United States Patent Application Publication US 2011/0189663 A1 - sequence listing, part 9

SEQ ID NO: 5693 - DNA, 1153014 bp, Homo sapiens
  WWOX gene - 76691052 - 77804065 of chr16; NCBI Entrez Gene ID: 51741; Build 35; sequence includes 20,000 bases upstream of initiation codon and 20,000 bases downstream of termination codon of the gene
aaatttctgcataaactgcttcttaatctgcatgcaattaaaagtaggtataaatatgaatgcagaactgccctgagctgctactttctgcctatggcatagtcctgctctgcaggggcagtcacagagctgcaacactgccggagctataacactgctgcttcagtaaactgttttcttctactctactaacagcttacccttaaattctttcttgggtgaagccaagaactcttgcaggctaagccccaatttggggctcacctgtcttccatcagtcccagctacttgggaggatgaggcagaaagatcacttgaagccaggagttcgaggctgtagtgagctatgattgcaccactgccctccagcctggccaacagagggagaccctgtctcaaaaaagagtagacccttctcttctaggtttttataatcacatgtcttttattcaagatattaatctctattagggatagaggttatctaggtttagtaagctattttaatatctagttttatggctaaccagatcctaattaatttacctttattaaacaaatgctagaaatgttcttagcttttcagtctgaaacacctagcactgtggccagctcttactaggatgctagctccaagattagctgtgggaagaaccacaaccgtgtaatttcatctccttcattcttgatgtgcttgtcagcataatggaggcgggagagcctctctaaatggtggctgggatatgcaatgaggtactgtatataagcccaggcagcataagttctctcccagatgctaatctcttttcatctctttacccttttgcaggcctctaagagtacctacggcacactagcaaagggcagtaaggatcctttgtttggaaacagcattttgcagtttacaagttcacaaaatctcttttggagcctgtgaagtacatagtactgtcatgaagagtcagaagaaagtaggtttcggggcagtactgccacttctctgattcggaagcaagttttacctcttagcctcaactgtaaagtagggataataattttggttacttcatagggtgactggtagaatgacataatttctagcaagtgcttgcaacaaagtaaatgttcaataaatgttagattttatcattcattagggactattagcccattagatgacaaaatgaagatacagagagcccacaatgactatactaatatttaataatggcagtattcattgattcaagccttattacatgtccagaaagcagctgttattgaggtatgggaggagaacagtggctgccaattctttgatgtttaataaacttttattaatgtccacagtgaacaaaggtccatgctgactttcatacttgattctaaagattgcaggatgagcgtagttggacacagtcattaatgtgattgttcttgcaataaggggaagacaaagaggcgtgccttgacaattacactactatgtactaaatgctatgctagaggaaagcatgtgatctacctatgcaaacacaaagaaaaagatgtgttagttattgcaattagtgattgctgtgtaacaaatgacccccaaacctaaaatagcaatgaatattgattgtctcacacagtttctgaaccacaggaattcaggatggcttagtaggatggtctggctcagggtctctaatgaagttatcagccttgactgcaagcacctgaaggtttgatcagagctggaggatctaagacagctcactcctagctagcaagctgatgtggccaccggcaggagacctcagttcctcgtcctgtggacctgctgcctgggtgtcctcctgacatggcagctagttttcctcacagcacgtgacccaaaagagaacaaggcagaagccacatgtcttccgtaaggtaggattgcaagtcacattgtgtcattacaggggttggccctatttttggtgggagggactatataagagggaaaatatcaggtggcaggaatcactggggccaccttggagggtggctaccacagaggtcaactggctctatctggtggttcagggaagactttctagaaggggtgatgcctgaaacagctaagtcaggaacgacgatttataacctgggctccatggacagaactcaaggagtctgtgaacttgagtcaggggaggtaggattacagcttcattttcacatacctatattgaaaagtaacattctttcaattatcaacgtaagaacccatgccagtgttgttagtaatacctgtgactttgtcaccagcagaaatttccactgttttgcattcatgtgtggtcaacatggtaagaccccgtctttacaaaaaaaaaatttaattactgttattgtagatatcatgaaatattgcttacattaatcaaaattatgaggctgggtacagtggctcgtgcctgttttcccagcacttttggtggccaagggagtaggatcatttgaagccaagagtttgagaccagcctgggcaatgtagtgagactgtcgtttctacaaaaaattaaaaactagccaggcatggtggcacatgcctgtagtctcagccactcaggaggctgaggcaggaggatcgcttgaacccaagagtttgaggctgcagtgagctatgattataccactgtactccagcctaggtgagagagaaagaccctatctctaaaaaaaaaaaaaaaaaaaaaaaaaaaaaaaaaaaaaaaaaattaacaaaaattatagtgattgtcagacttattgttctcactcacaagtgggagttgaacaatgacagcacctggacacagggaggggaacatcacacactgtggcctgttgggggatgggggacaaggggagggagaggattaggacaaatacctaatgcatgcggagcttaaaacctagatgatgggatgataggtgcagcaaaccaccatggcacatgtatacctatgtaataaacctgcacattctgcatatatatcccagaaattaaaataaaaaacattagagtgatgttagacctcacaccagatcttgatatttaatgcataattaatgaattacagatatttgtatataattttgtttttaatagtttagtaattatatttcaatgtacttgtctttgtaactgtgtgttttacattatgcaattaaggacatccttttgagaaagaaaccataaatgttaccagctgccaaataggtctataacacacatatatacaaaagtagagagtgcagaaggatgaataggaattatccattaaaaggaaaaaagaaatggcattacaggcagaggcaagaagcaggcaactgtgtatgtatacttgtgtattactaagagtttcaagtccaaaaaggggaaggacgtaaatgaagccataaacataatagggaccagttcataaaacattaggctaaagaacctgacctcgataccatgtggtagtaaaggctgggataggagatccaaaaaaatttgatttatgtatttatttaataattatttcttttagaatacataattcatgtacaaatacaaactttaaagtgaatatggcagaatgcttccttttgttacttgctgcggctactctggaatgttttgcaatccagaagccaccacgggtttctttacattctcaagaaaacatttttatgtaagggaatggctgttcagatttgcattttaagtagtttactctgatcaagttgccaagtgagacaaggctttatggagaagctgctggtgagggtgagaagcaaggctaggaatatgagggggagaatgttattctttactttctaaaggagtgaaccacaaagctgtttgcagattccacacatgcagagaaaacacaattcatttggttggtaagttcagatttcttgtgccaaacatgggaagcagtacagcgaggtgattaaaaatactgcacaggccagtgaggtggcttatccctgtaatcctaacactttgggaggctgaggcaggacaattacttgaggccaggagttcaagaccagcctggccaacaaggtaagactctgtctctacaaaaaatttaaaaattagccaggtgtggtggtgtactcctgtagtcccagttactcaggagaccgaggcaggaggatagcttgagcccaggagtttgaggctgcagtgagctgtttttgtgccagtgtactccagcttgggcaacagtgtgagatcctgtctccaaaaacaaacaaacaaacaaacaaaaccccaaaaaacaaacaaacccccaaaaatgcagacttgcagactttagaattgagagaatttggattgagtctctgctttaccatttgctaagtctttgctatttgctaaactaagcctcagttattgcttctatagagcaaggcttttaatacccacctctatctactcctgatgatggtgtatctgataatgcttggaaaacgttccatacagttatgcatatactttaaagtcagatctaacatcagagtggtgcctcatttttgagtcttaaggttctgccagcccagctttaatcaccaacaacaatgacgatagctaacaggtactgagtgcttactctgtgcctggtgctgtgctgagtgctttgtagtcatcacttcctttccttttttcccttcacccactttctggtacctttgcatgtgcatgtctgtcaaaatctggggtgaatcttgggctccaggccctggactctttggaagaacttacttgcaagattataacagcaatggatcagagcggcatcttcaaaacttcggcagccaaaataagacactctaaacagacaatgaaagactttacagtatttcacgcctgtaatcccagcactttgggaggctgaggcgggtggatcacttgacgtcaggagttcgagaccagcctggccaagatggtgaaagcctgtctctactaaaaaaaaaaaaaaaaattagccaggcatggtggcaggtgtctgtaatcctatctactcgggaaggggaggctgaggcaggagaatcacttgaacctgagaggcggaggttgcagtgagctgagattgctccactgcactccagcctgggtgacagagcaagactccgtctcaattaaaaaaaaaagactttagacagaatggacttgttgctgcaatttttgagtgcttgggtccaacatacctgcccccacgggagggtgatttttttccctgcagacaggaatgaagttggactgaaatgccattttaccaatgccagcaagttagccattatatgctacggctactttgaagcttggggcttcagtgaagtttccagtgaagtttccaaacttagaggcctaatttccagaagtcacagcaatgaatgcactcaccaagggagagggcctaagtgtggcccaggagaaaatgtgctttattacttagtcctggggactttcatgataaaacaaaatcaggctctccctgttatgcttcagggaacccatttcacagcctatcataggtgctaggtttacaagctacctagtttaatgaatcccaatctttcagatttcacgcaatagagaaaagctttggtttgttgtttttatcgttatttgtgcattgtttttaatgagttttatagcgagattatcaactttatcaatgtgtcaagaaagaccatttaaaaaaaaaaaacaaaaacactggcctgtcatggtggctcacacctgtaatcccagcactttgggacacccaggcaggaggatcacttgagctcaggagttcaagaccagcctggacaacatagcaagaccgtgtctctatgaaaaatttaaaaattagccagatgtggtggtgtactcctgtagttccagctactcagacggctgaggtaggaggatcgcttgagccctggaggttgaggctgcagtaagccacagtcataccagtgccctccagcctgggtattattattatccaaaataataataaaagtaataaaataaaagtgagaaaacaaatcaataccctgccatcactatcaccttccataaaaggtaaaacattttaacaccaaaacagtagaaaatactacacattacctgagaacaatttttgccaagaatctaataaagcttctggtcttacctccaggttacagaagacatagagacagaggagcaatttaaatagggccatgaggaaataatcagaagaatctttggcgcacattctgtaagacggcatgacctggaacctttagatgtcattgtcacagggaaaaagatttggggggggggcaaatctctagaataaatgagaccaaagagacaagcgaccaagtgcaatgcatggaccttgaatgagttggtgctcagagggggacaaagctataaaagacattttacaaaaagtgaagtgtagagttaccatatgacccagcaactctactcctagctatgagaaatgaaaacacatgtcagctgagagtggtggctcctccctgtcatcttagcagtttgagaggctgaggcaggaggatttcttgaactcatgagtttgagatcagcctgggcaacatagggagaccttgtctctaccaaaaaagaatagaaaagaaaacacatgcctacacaaaaatgtgcatagctgcattactcataataaccaaaaaagtgaaatcaacctaaaagttcatcaagtgatgaatgaataaataaaatgtggcacatccatataacggaatattattctgtcataaaaaggacaaagtattgatccctgctacagtatgaatgaacctcaaaaacgttgtgctaagtgaaagaaaccaggcacaaaagactacttgttatttgattcaatttataggaaatgcccagagcaggtagattcatacagataggaagtcaattaatggttgccagggattaggggctatggagaatgaagagagagtactaataggtttctttttggggtgatgaaaatattctaaaattagatagtggtgatgattacagaactctatagatatactaaataccactgaattgtacactttgagggggtggtgaattttatggtatgtgaattgtatctcaattttaaaaacccaaaataatagtttaggtacaattaattgacataatggagatatcagtcattttcttaggtatgaaaatggcattggggatatggagaataataacctcactcttaggagagacctgctgatgtattcataggtcaattgtcatgacgctggcaatgcattttcatctagctgagctcacacaacagaatgggctctttacagcaaatatgggctgagtaagctgacttacacctcttaatccagcactttgggaggccgaggtgggaggattgcttgaggccaggaatatgagacaagcctgagcaacataacaagacccccaactctactatatacataataaagcaaatatgggggcaggagtatttgcgcattcgttgtactcttctctcaacttttctggatggctaaacattttctttctttctttctttttttttttttttgagacggagtgtcactcttccacccaggctagagtgaagtggcacgatctcagctcactgcaacctccaccctcaagttcaaacaattctccttcctcagcctacgagtagctgggattataggcgtccgctaccatgcctggctaatttttgtatttttagtagagatggggttttgccatgttggctaggctggtctcgaactcctgacctcaggtgatctgcccactgcggcctcccaaagcactgggattaccggcgtgagtcaccgtgcctaggtctaaacattttcttaataacacatgctgggatgagagaaaaaaatcatcagaaagcaataaaagtaggacagatatgatctcagaaaataaaaggacagtactttaagtagaatatatttagcttaagaaattttcatttcttttttctttttcttttttgagatggagtctcattcttccacccagactgcagtgcaggggcgcaatcttggctcactacaacctctgcctcccaggttcaagtgattctcatgcctcagcctcccgagtagctgggactacaggtgtgtgccaccacgtccggctaatttgtgtattttttagtagagatggggtttcgccctgttgaccaggttggtctcgaactcctgacctcaagtgatccacctgcctcggcctcccaaagtgctgggattacaggcatgagccatttcttttttctaatttttctcactttcccatggagtagtgaaaatctcttggcacccgtcagaggaccagagctggggctccactgtctgggagaggcagcgctcagggcaccaagttgacaggatgagttcagggctagtgcccttatttgtattctaaacccagccactgttagctttcgcttgccacgtggccttgggcaagttaacttaagtttcttgtgcctcagtttcctcatctatgaaacttgggttgctaataaacggtgtcttctcataggtggttgtaaggatgaagtgagttaatattggtaaacggcctattatcatgcctggcatgtagtgcgtgctacatgaggatttgttaaataataaaaccccatttctttatagctatgtgtgttcattttctattgctgctgtgacaaatgactgcaaactgggtggcttaaacaacacacattatctcacagtttgtggctcagaagcctgaagctgggttaaaatcatggagtcagacaggaggtgcctttctggggactctggggcagaatctggttctctgcctttttcaccttccagaggcttcccgttcggattccatggctcaaggccccctccttctgtcttcaaggccagcaatagtgcgtcaggcccctgtcacactgcagcactctgacctcccctctgccttcctctttcatttttaaagacccctgtgattacactggactcccttggataatccagaataatctcccctttttttttaaaaaaaaaaaaaaggctgcaccaaaggcatagtctagctttatgaaagggcctatgcatagagtcagtgtaaaaatactgtaagtcccatcagcttaatagcaataaaaattccccaaaatggccagcacggtggttcacacctgtaatctcaaccttttgggaggctgaggtgggtggatcgcttgaggccaggagttcgagaccaacctggccaacatcgtgaaatcctgtctctactaacaatacaaaaaattatccaggtgtggtggtgtagacctgtaattccagctactcagcctactacagaggctgaggcatgagaatcacttgagcctgggaggcagaggttgcagtgagctgagaccgtgccactgcactccagcctgggcgacagagcaagaccgtgtctcaaaaacaaaaaacaaaacccaaaaaatggaaagccgaagggacagaggaagaggctactggacttggtacataaggagcctggctcatggcaccgggcctagccacagggttctccagcattgctgttgctatgaggtcgggggatagcgattgtcttatgagagccactgttcacctgggtcagggaccctcacttctggggtgtgcttgacttctgcctgcccccggtgctgtccagcaggccagagatgaatgctctgggaggctctgcgacaatcgtccccgcagatccacccaccctttccaatgttcctgtttattttattcaattaattaatttatttttcaagaccaggtctcactgtgtcaccaaggctagagtgcagtgatcacagcttactgcagcctcgaatttctggccttaaacaatcctctggccttagaaacagctaggattgtaggcgtgggccaccatgcctggctggtttttgtattgtttgtagagaaagtggtctcactatgatggccaggctggactcagactcttggcagcctcaatgatcctctagccttggcctccgagggtttgggatgacaagagggagctattgcacccggcctcaatcttcctccctaattagtaactttaatttcatctgcaaccttaattcccctttgccatgtaatgtaatgcattcacaggttctgagggctaggatttgcacatcactggaggcctttattctgcctaccacagtacaggaacttttggcagagcgaagtcaatggactgagctaagcaaccagaagaacactagtgtgaggactcacgtcaccaactggacttggcccacagctatagtatttctctttcctgttactgttttagggaataaaacccacatttgatgaaaggttgattatgaacagagcttatgacaaggcaggtacgtggttggaacttactacccagagtgcaggaactacaaaagaagaggttttcatgtttatagaataacaggagaaatagtagtgtctcagcaagagagagtgtggctgccggctggccagggtgtgtggctggttcatggaataaactggagtagaacagtctttcctcaatacctgcatataactgacatttaattaatactggtagatgaactgacctccaaggccaagtctcttttactctgtcaactgcttgaccaaagaaattggaagttcaccagatcccctttaatgccagctgaaaaataagaaatggacacgtgtaaacctagataaggcattaacaggcagacataatgaaataggggaatgttttagaatccattattttttcccctattgaaccaaatattaaactctcattgcttaaattaattttagcttaatagtttaaaatattctggcttctgcaatttacattgtaaatttctcatatgtgtttgctgccttgtatgaagcaatgttaaaataaagctaaagtcaccattcaagacattaatgacagtctggatatgtggagacacaaatgagtggactgggtgaatagggtggtgatggacagatggacggatgcacagagacagagggatggggaaatgaactcataaaggtgaaaatgcaggagtacaaagaggctacattgcatagtggttgacagcagatgttcaaataccagctctgacatttactgggtcaccctgggcaagttacttaatccctccatgtctccacttgttcataaaaataaaggccatgtggatgagcatggtggctcatgccggcagttccagcactttgggaggctgacgtggcaggattgcttgaggccaggagtttgagactggcctgagcaacgtagcaagacccaatctctacaaaaaaaattagccaggcatggattttatagataggcttgaggaggcagtgtctgatttatgtagggcctacagattgtgtagttgttctcgtgtcacaggtgtgacgtttacatattgcatggggaagactggccactccactctaatcttattaagcagataggctttccacttggtcagcaccatgttgtctgctccctactgcacacatggtttgaaaggaaaaaagaagatggagctaccgttttgaacacgcctagtcccacgtagccttttcctattggcacagctgccagcattcacttgtgcaagcttctagcttgcttgcccatgtttgcagctcgattttacaggctgctctttgttagaaaagaaaatgatttggagactgcttttcatcaaaaggaaaaccttatcaatggttcccataccctcactatctgcctaagtaattactttttaactcctatgtcagtatcagtgggacctgacactgggctgaaccaggggtgtgcagggaagaggtggaaacagagcaattgctaaggaggcactgaggcccctcagacatttgcaaagttctgacgtcattgttttaactgtgcctctgttggcatcctaggttaccaactcccaggcaactacatcctcctctcctaccctacccccattggccatgttgccactctatcacccaaattaaatcactgttagttctgagagcagcttgactggattaattccctgtcaatgcattccccacccatttgctggagggcttaaaaaatgtaaatttgggcctgcaaggtagctcatgcctgtaatcccaaaacttttggaggccgaggtgggcggatcacctgaggtcaggggttcgagaccagcctggccaacatggtgaaaccccgtttctactaaaaatacaaaacatgagccgggcatggtggtgcgtgcctgtaatcccagctacttggggggctgaggcaggagaatagcttgaacccaggaggcagaggttgcagtgagccgagattgcgccactgcactccagcaggggcaacaagggtgaaaatccgtctcaaataaataaatatataaataaataaataaataaataaataattaaataagcaaatttgattgtgtcactcccttgcttgaaaggctcccttggctagacaggtgcttggctatatatcctagaggtttctcagagtaattcttaataacaccctcttgctctctccaatgtgtctccattaggaatataaagttatatggtcaccctacttaaggggctcagagtgatcttaccacttcccctcctgaccccatcacaggcttctgcagctgtagctaacacttggagtgtcctaagtgctgatgctggagagctactgtttcctcctgttgctctcagatccattccctccctttcttctggagaggagattcttcccaggtgcccaaagccctctggcttctgagtggtttcatccgatgagaagccctggcaggtgacttcagggagccagctattcttctccccatgacctctgcagggttttcctgcagcaattattctttctccagggtccagtcgcctcagggcagcctgtcgtggatgagcagtgactatgtgggctggtgtcgtgggtgtaaaagaatgaaccaagacagttgtaggtaaagaaaggcggatttattaaaggcagtaggaaaatctgttgcaaggttgcaatgggcagaatcagcagaagaggagctgacggcaaggatacaaaggcttgttggagattttatatagttttaaaatgattcttgggctgatggataacgccaaggtagcagggagctaacttgcattcttctgtcagccgaagtgtttgataaattgaagagttagatgacaagcaggaaacttgtgtgctgtgtgcgttatctgtgcaggagggccatgtgtctggggccgtaaagaaaggccgatctatagcttcctctttgctttcccctggtcctgccagcctgactcctttttcctaattaggactccacatagcccccttcttgcctctggctccctagcttctgtcatagctcctcttcgtccctccagcctgtgtcctggaaatgactttccattctggctcatctctcacttgcatcattagcccgaatttgtcttctcagctgttccataccctgtgtaatgaattccctctgtcaaattcgaaatgtttgctggtgttgggagctcatgcctgtaatggcagtgctttgagaggctcagtcaggaggaccgcttgagccaaggagttcgaggttacagtgagctatgattgcatcactgcactccagcctgggaaacagaccaagaccctgtctcttaaaaaaaaaaaaaaaatccaaatgttaatcctggcttattttcctgatcagaccccatcatatatatgatgacatgtgttgacttatttaatatcgtaacacggctgtgaggtgggcattactattattttcatttttcagacaatgaaactaagggaagttgaagggcttggccactgtcacagtttgtgacataagttgggttcaaaagataaattacaggaaactaacatgggaactctccctgtttcagcataccttacaggtcttggtttaaatttgtcttagaaccttcaatccacagttctttgggttgactgttgaccttctgctaattcactgttatttctggatataaggagtctctctctatatatatatcagagacagcttttttttttcatttgtgtgtttgaatgaatagatgaaatacaaacatatcttcctaaataaggacgcattgattagaagagttttccataagactgctgttcaacattcttccttattggttacttctcaatgagaaattatccgaagagctaggatgcctcccagatctcattggtacattgagttttgcaccaaagcatcaggcttaattttccaaggaatggcaatttaagttaaatcaggtttgcagagttgtcggggtgtttgtgtatttgaggttgggaggggaaggaaacgatcatcttcagggtaatgataataaactaataaaatgtggctccaggaatgttgcactaaaactttgtgcctcctgcatacatttcttttgagtaatgccaaattgtgttcagtaaaatctgatcaatcttatgtgcgtaaattgtcagttattgcagaagtaatcagtcaaaaagaaaagaaagtttaaatgtagagacccttgttaggagctgggctttagcctttaaaatcgtgggtggatagggccatctggtgtgcagttgtgtaactagacattgctgttttttttttaacctccttgctaataatcaatgtgattcatttgtctttacaaaaacaaaccattcttttgttttgtttttttttcttcaacttttactttaatttcaggagtatatgtgcaggatgtgcaggttttttacacaggtacatgcgtgccatggtggtttgctacacagatcttcccattacctaggtattaagcccagagtccattagctattcttcctgatgctcttcctcccctcctgcctccctctgacaggccccattgtaggttattctcctccatgtgtccgtgtgttttcatcagtcagctaccagatagagaacatgtctagtctgttttcatgctgctgataaagacctacccgagactgggaagaaaaagaggtttaattggacttacaatttaaaaagagatttaattagacttactccacatggctgaggaggcctcagaatcatggcgggaggtgaaaggcacttcttccatggtggtggcaagagaaaatgaggacgaagcaaaagtggaaacccctgataaacccatcatatctcatgagacttactcacttcacgagaatagcatgggaaagaccagctctcatgattcagttacctcctgctgggtccctctcacaacatgtgggaattttgggagataaaattcaagttgagatttgagtggagacacagccaaaccatatcaatgtggtgtttggttttctgttcatgtgttagtttgcagaggacagtggcttccacctccatacgtgtgcctgctaaggacataatcttgttccttttcatggctacatagtattccatggggtatatgtaccacattttctttatccagtctatcatcgatgggcatttgggttattctatgtctttgttattgtgaatagtgctgcaatgaacatatgcgtccatgtatctttataatagaatgatttctgttactttgggtatataccaagtaatggaattgctgggtcaaatggtatttctgcctctaggtctttgaggaattgccacactgtcttccacaacggttaaactaatttacactctcacaaagggtgtaaaagtgtttctttttctccacaacattgccagcatctgctgttttttgactttttaataattgcccttctgattggcatgagatggtatctcaatgtggttttgatttgcatatctctaatgatcactgatgttgagctttttttcatatgtttcttggctgcatgaatgtcttgagaagtgtctgttcatgtcctttgcccactttttaatgggattgtttaaaacaaactattcttaaggctttcttagggtaacatttggagaacattggctcattcccaaacataagccttctcaaaccgattaaaatctaatcctcaccaagttaagtagggcttgcctgctgatagatcctcatcagagcaaagtcaaagctaaagttcagggggacagaaactgagtaaacagaggaagccagtaaggagagagcagaaaatgtagcccatgggagggaggagacaaacctcaagaggaaaaagttcccaacacttgcatgtcttacttctttaacctcatagaacccaacaaataagttataagaaagggagaagaggccgggagtggtggctcatgtttgtaattccagcactttgggaggccagggcgggtggatcacaaggtcaggagttcaagaccagcctggccaagatgatggggaaaccccgtctctactaaaattacaaaaattagctgagtgtggtgacgctcacctatagtcccagctacttgggaggctgaggcaggagaatcacttgaacccgggaggtggagattgcagtgagccaagattgtgccactgctctccagcctggtgaccgagtgagactctgtctcaaaaaaaaaaaaaaaaatggagaagaaaatgtgatcatgataaccattcccgccattactggagcctggaccagccggccagatttccacaggatgtctctgacctgcagaggggctggcaaggtgggaggcatccagaccatgttacagaactcagtaatcagagcctgtgctggagccaccagcatcccaggaccaccatgtgaacctcctgacaggagcaggctcctcaatgactgaaatgaatctcagcagaactcctgtgattcataagtgactcatttactaacttattgtcagtatagattctccactgggagaagacgggcaacttctggagacatttttggttgttacaactaggagaggggcatctactactcgcatctagtgggtagaggccagagatgctgctaaacatcctactgtacagccccaccacaaagaatgatctggctccaagtatcggtaatgtcgaggttgagaaaccctggtgtcagcagtgggagaagccttagagggaatttccaaagtggtaggatcagcacaggatagaccctgaagtttaaacttcttccagggggaccgttacccagtttggggaacaccatggtatatcactagctgtgggctgatgccaagttacaggtaacagatgccagcagaagctctgggcagaggaaaccaagataaacctaagcagacagtccttgtgaaactgaacagagtcaaagataatgaatggagaaactgaggctaatcagtttgacctcattccttcctctccccacaatcaggggatcttatgactgaatttcttacaaatagcaaaggaataagtaggcttaggtgagaggggaaaggggctaaattgaggggagcagtggagcaacagattagtggtagcagatttatttttatttatctttttttgttgttgttgttaagacagaatcttactctgtcacccaggctggagtgcagtggtacaatcatggctctctgtacccttgaactcctatgctagagcctaggagtaaatactaggattactagagtaatcctccgacctcagcctcccgaatagctgagactacagacatgcaccaccacactggctaacttttaaattttttgtagagatggggtggtgggggtcggcggggggggggggggggtctcactatattgcccaggctggtcttgaactcctgggctcaagcaattctcctgccttggcctcccatagtgctgggattacagttgtgagccactacgcccaatccaatggtagcagatttaaacacaggtggatttggaaaaaaaatcttacgataggtttaatatgagtcagcaggcctgttgaaacaaaacagtgctttgttaagcttgtttttggttggtcaaatgtagaaaggcaggtgtctccgctaatgagtacgtagagcaggaatcctaagcaatcatccatttcagaacatgaagacaaaaagcagctgcccctcccatacactgcccattaaaatacatacttttaaaattccttattttcaattttatttttttgctctctcagaagaatcaaatatatgtaattattctgatggaggcttgcattctttgggacctaggcctgagaaatcacggtcagtagatttccctataacatggggctggggagcaagtgccaaacagggaatgttctgaaaactccttaggcacaagctgaagatatgtttgaggttttggatacagaacatttataggatatcttttggtggtccaagaggacttgagtgtaccttgtaaatacaggattttgtttttaattagattgattcacagagaaccaaacctaaggaatcacatcattcattcatttgttcatttaataaatttgtaggttgaagcatttaccaagtgctggcaatagaaagaagtcccgggtgtgctttgtcagtttagtcgggactacacaaatgagtcaataactgtagtggagtgatgcgatctcaactgccaggaatcccccggctctcctctcttcctgtgcctcttcaggtaattagctatcctttctttcttttattttccttccttccttccttccttccttccttccttccttccttccttccttccttccttcctccctccctccctccctccctccctttctttccagattctggacctattccagacttactaaaggaaattctctaaaggtgaggcagttttttaaagacagcagctctctctgtcgtccatgctggagtgcagtggcccgatcatagctcactgcagcctcgacttcttgggctcaagtgatcctcccccttcagcctcaatgagtagctgggactaccgatgtgcactaccacgcccggcaaactaaaaaaataattatttttggtaaagacaggggtcttgcgatgttgcccaggctgttctcaaactcctggcctcaagtgatcctcctgcctcagcctcctaatgtgtttggattacaggcatgagccactgagcccggcctagctaccctgtctgagttgtgcccactacacaaaggtgtcagctacatgtgatgtctgtgcatttctggcctggaccgcacattaagtgctccgtaaacatcagtctctattatcaacagtctctattatcaatcagtctctattatcatcagtctctattatcatgagtctctattaaacaacagtctctattatcacagtctctattatgtgttttggctgaaagaaagttctctaaaaccaggaaatcaggaatcagcagttttaagttctccaggttatattttaacattgtgttcatatgcaaaacaaaggttgtgaatcagcacgaatgctggcaagccctggaaggtttgtgatcacggactttcacgagaccccaaggcaaggagagacagaagcccaggacaacagcatgggcgccgctttttagtcgggcgccgctttttggtcaggcgccacctggactacatttcccatatccaattgccgggctcctgcaggattggccagaacaacgcggaagtgattacgggtcgcccagcaacgggcggagtcctggcccgaaactggatgcgcacgccccttccctgcggcggggaggctgacaaggctccgctctatctctagcgcctcggagcgctctccggctttgctgtctagcccggcggcagcgcgatctcttaggcactttcaccgccttcctctccaggccctgcccctttgacgccggccgtcgcgatattgcggagactggatttcagcttcgtggtcggcggagcggcccctggagggcgcagtgcgcaggcgtgagcggtcgggccccgacgcgcgcgggtctcgtttggagcgggagtgagttcctgagcgagtggacccggcagcgggcgataggggggccaggtgcctccacagtcagccatggcagcgctgcgctacgcggggctggacgacacggacagtgaggacgagctgcctccgggctgggaggagagaaccaccaaggacggctgggtttactacgccaagtaagggggccgcagtggggccgcggacgcacctgggaccctgcacagcccacggacgccacctgcgcggggaggacgcgcactccagcgcagcgcgtgcggtgcaaagtgaaagtaactgttaaggagcttcagggaaaagggtccagggttcccagtaggggccggcccccttggtgggcctcgggtccagcgggggtcacctggtggcttcccggcgcgccctctgctgttcaggatgcagcactgcgcggcgcggcgagggcaaagcggcctcatccccgccaaaaaataaagatgttttaaaaagcgcacatgctcagctccctcctgcaggctctgggttgcagggataggagttttgttgtgttttgttttgttttgtccagaccggtattgctcagtcatccaggctggagtgcaggggtgccatcatagcccactgtagcctctacctactgggttcagacaatcctctcatctcagcctcttgagtggctgggactacaagcgtgcactactatgcccgactaattttttaagtatttgtagagactagggtcgcaccatgttgcccaggctggtctcgaactactgggctcaagcaggccacctgcctcagcctccagaattgagattacaggcgtgagccactgcgcctagccaggagtattttttagtagcagtcctagatagcttcactatcatttcctgggaaagttttggaaaccccagcagagccttcatctttaactgtgtgaccttgggccattgaaataacgtttaatcttggttttttcacctgtaaaatgggttgatacgagggtcagttcaggcactgtgcgtaaagcacatagcaccgtgtctagtaggtactctctgttccttaactgtcgttccttgattgctcttaagatacgacagtgcctcttatatcggcaccttagaatcacctaggaaatgtcctaaatacacgttttgggtctccatagagaacctactgtagccgactctcaactttgggagtctctttttttaagctttccaggtgaggtggaatatcacctggttttgagaaacatggatgtaaatctgattttcagcatctgggaaactttttttgtaagagcctttttctgggccccacttccagagggtttttcttttttttttttcttttgagacggagtcttgctctgtcgcccaggctggagtgcagcggcgcgatctcggctcactgcagcctccgcctcccgggttcacgccattctcctgcctcagcctcccgagtagctgggactacaggcgcccgccaccacgcccggctaagtttttgtgtttttagtagagacggggtttcaccgtgttagccaggatggtctcgatctcctgacctcgtgatcctcccgcctcggcctctcaaagtgctgggattacaggcgtgagctaccgctcccggcctttttttttttttttttaaagacagggtctcgctccgtcgcccaaactggagtgccgtggtgcgatctcggttcactgcaacctctgcatgccgagttcaagcgattctcgtgtctcagcctcccgaatagctgggattacaggcgcccgccaccaggcctggctaatttcgcgctgttggcccggctggtctccaactcctggcctcaagtgatccgcccacctcggccccccaaagtgttggcattacagacaggagccactgcgtcagcccagaatttctgatttaattggtttggcccctcccctctcccttggtaggttgtaaaatcttccctcccaggtgattctaatctatgcaaggatgtgaaccactgctgcctttggtggcaaggtagaggaaaaacaaccaagttctgatgagttcattcaagacacacacaggtattatgtgacaggcctttggctggcactggttataccgaggcaaataagagccagttgtcatccttaggacccaatcttattagggcacagtgacatgtgtaggagcgtccccacgcagtgtgtataccaggaagtagtgtgtctggcatgaggtgtgtgtaggtagttgggggggtcgtgagggaatatggtggcaccctcacagtaaccttcacttcctgggctcaagcgatcctcccgcatcagcctgttgagtacccgggaccacaggtgtgtgcctccacacccagctaattattacatgttttgtagaaatggggtctcaccatgttgcccaggctggtttgaactcctgaactcaagccagcctccctcccgaagcactggaatcacaggcctgaggcactgtgccaagcccagagcggtgttttgagctcaagtagaggtgggtggggcaggagggcagtctaggtagagggaacagtgagaggagagaccccctgcatggcctgtccaggggcctgtgatctttgtgagggtccaggaatgtgaaggttaaggcagggaagggaggacccatttcaaggatttctgtgccttgccgagaagcttgggctctgttggcagagccagagagtggcattcattcagcttgtgaattctggaagaatttctggctctggagaattaaagggacatttccagcagcagagctccagtagcctttgcagggacggaggcaagctcctgagcgggcacttgctgttcctctcacctgtacatctgttggggaaaggctccttctcatccttcagagctgagcttacatgtcactgcccaagagaccttcttaactgtgggtgtcccctcgaccttgtactagtcaccttgtttctctgcttcttcgtgcttagccttggctgtgtactcctccttgttggccctgtctcccttgcccaggttgcagatgtcatggggcagcttgttcatctgagtgtccccagtgcttggcacccagaagccataagatgagcccctgtgggatgagtaaatgaatcaccttgggagggtcagccgcaggcttctgtgggtgggtgggtggtgcactgggccccagagtacaaagatgcacatgacccgcttccggcttcctaagcccacctctgcctctggctctgtggggcgtctcctcctttgccactcagccccagaggtgcttctgcttccctgcaggcttgccctggagcctggcgctagggccctggggctcccttgctcctgcgtgccccctgcgcctgccttcctgctgcctggcctttctcccatctgctttcttcctgagtggcccctggccaggggactcgggtgcatacatggtttccaaacgcctttcctccagccctcccgactagtgtcttaaatctcaagctggcctctctggctccgctgttttttttttttttttttttttaatttaatttaactttaaattccgggatacatgtgcaggatgtgcaggtttgttacataagtaaacctgtgccatggtgacttgctgcacttgtcaacccatcacctagttgttcagccccccgtgcattagctatttattgtatacaccagctgagatgccagggcttggctggctctcagctggagggctcactctctggaccttgtgtccgtccctgctggccctcagttctctggatcagggttgaaaggctgaaattctttgggtgttagcttaggatgcctctgatccatcctaacccgacattcccttgatctctcctgatctgtgagcatcctggcccttcttttcttttcagttttaatttttgcgctggctccaaccccttttcattcctgactctggaagtgacacttgtttttctcttggggtttgggaaactttgtggttgttctttctaggaggctgctctttgagtcatttcttttccatattgtttctcctactgtagcagggccatggccagggatagaggctgtagctcccactgagacctcggggtctggtggaacccggtcttgtgtgggtgctgtcggcctctcctgctttcccacctgcctcacggttcacttgtgtgcctcaaaggcacacatgtcctagcactccaaagcccaccagggtgggctcccaggggtgaggtcgaggtagaccgggaacccaagagagctggtgggcctttcttctacccctctcccctcacagtctcagagcagccccttcatgggagatgggaagtgagggacaaggtctcagtgtcagagccgtccttgtttgcccttccccgtgcctcttatgaagctcaggccttttggcagtcagaggcctcaatggtgcctgtgtccacagggctggctgtcctcaccgtgaagtctagatctccctgctaacttacactgtgctcaaaacacacacacacacacacacacacacacacacacacacactggctgtcctcactgtcaactctagatctccctgctaacttacactgtgctcaaaaaacacacgcacgcacgcacgcatgcacgcacatacacacacacacacacacccataggctggccatggtgggaggccaaggtgggaggatcgcctgagcccaggagctcgaggctgcagtgggctatgattgcatcactgtactctagcctgggccacagaatgagaccttgtctaaaaaaaaattaacagaaaacaccccatacgtggaagtgtggtattcacataatatgatgttcacttaaatttgaatcctttggtttaagtttagattactcttaattatctttttaaatgacaagctcgttgaaagaataaaaaatcaaagacggcttctatttaaaggagaataggagaatgcttaggggacatgtgttctaattttctcttcattaaaaagtcatttaaggttataattaaaaagaacatcttttaattaatttttatatttattaaaaaaaagtcttctattgaaaggtacagttcttagttcttcccgtgttaactcactcggttctctataaccccaagaagtaagtgctgttattgtccccatctaaactgttgaggaaactgaggcatgggattaaatgacttcttcaagggcagagtggctggcaaatgggagacccagaaaaccttggcagttgggcttcagaatcttcacgaccaaattactctctctgcttcagctggttccggattcttccccagggatggttgtgtcctgcaggggacggctggcaatgtctggagatgctttctgttgccacagctatgggactggggtattggcatctgatgggcagaggccagtggtgcccaaggcagccccgcaacaaagaatgatgcaggccgggtgcagtggttcacgcctgtaatcccagcactttgggaggccgaggcaggtggatcagttgaggtcaggagttcgagacctgcctggccaacatggtgaaaccccatctctactaaaaatacaaaaattatcccggcatggtggcaggtgcctgtaatcctagctactcaggctgaggcgggagaattgcttgaacctgggaggcagaggttgcagtgagctgagattgcaccactgtactgcagcctgggtgacagagtgagactctgtctcaaaaaaaaaaaaaagaatgatccagccccaagtgccaccagcagtgagaataagaaaccctgattcaggcatgttctgtgaaagtcaagaacgtaggttgacagagtttgttttgttttttaaatgtctttctgaataaataaaaactgttctgagtgagttttgtagttcctttggaaagtattcattctgtttgtttacatttgtgcgcctgctgtgggccaggcatgaggctacatgtctgagggcccagcttcaccttctaagggctgggaggctctttctatgccagcctgcctgccaacaaggctcagcttccactgttaagggtcattttgtggatttttttattttttatttttaggttgagtcttgctttttcgcccaggctggactgcagtggcgtgattttggctcactgcaacctccacctcccaggttcaggaaattctcatgcctcagccactcaagtagctgggattacaggcatgtgccaccatgtctgtctaatttttgtatttttagtagagatggggttttgccatgttgcctaggctggtctcgatctcctgggctctagcgatcctcccgcctcggcctcccaaagtgctgggattacaggcgtgagccaccgtaccccgccactccatggattcttgagggcagagttttttggagccaggcttcaagcacatttgatgtgtgcctatgagataaagactgcttttaatggcaggcaaggaaaatgcaagtccatctcttaactttcttgaagaagcttgagacacagctctgcaaggggctggaaggtttcatgttattgccaatgcttggtttatctgattgctgttgccattcattttgaaggagaagcaggagttggtataccaatattcccactgtgccagcagagagcgggttatccttactagagagccagagagtcagaacggtttttttttgttttttttttttttttttgagatggagtttcacaattgttgcccaggctggagtgcacgatctcagctcaccgcagcctctgcctgccgggttgaagcaattctcctgcctcagcttcccgagtagctgggattacaggcatgtgccaccacgccaggctaattttgtatttttagtagagacagggtttctccatgttgttcaggctggtcgcgaactcctgacctcaggtaatccgcctgccttgccctcctgaagtactgggattacagacatgagccaccgcgcccggccacagagctgcttttttttgcaagtgatattggatggtggttgatgtacaaagtaggagtttgtccttgctactgataccgtagctggtacaaggttttaatcgttctccaagcactgtcacaggtgtcatgtgtctcgccttttcagcagctctgtgaggtggcagtagccctgaggagactggctggactcagctagcatgggctgctcaggtcttcagcgtgctgagtgaggcattcctgcactatgacagagacccagctgccaagactttgtcaaacagaccagaagccagcagttcatgaaaagaccttgcttgcaagttgtagaattttttagaaaattcgtgctctctgtatttattttctgtaaaataattgatagggaaagaatgttcacatcttatcatctagatgttgctgattaaataatataactttctgggttggcatgagtaggtgaacttttaggaaacgcagcctacccttcgaatacctcttgtagcacctggctgtttcccttttgaaataattgtatgttttcctggataccttattacctggtgacacgtgtttctagttattgacctatgtttttaattataactttgggtggtggtctgaaatgaaatgttaagtttgacgcaaaaataggactagtttgtgtaactgatttgttcagaataacagcttacatttctcagagctttttgtatgccaagtgctatgcgaaaccctggatgtacaatattcttatagtagcccctgagaccagtgctaggattatttccattttgcagatgaggggatggagattaaggagtggggtcacttgaccaaaggtgcacagcgcacagctagatgccctatgggaaggtcttactgcatctcttaactacctcttgggaccagttaggaaccagtgcttaatgaaacactttgaagttacatctgtggaaagaataaacattttagctgggcaaggtggcacgggcttctagtcccagccactcaagaggctgaaataggagggttacttgagtccaggagttccagtccagcctgggcaacatagtgagaccctgattctttaaaaagaaacacaaataaataaacattttaagagattatataaattagatattatgaattttgtccctacatcgtggaataaaaccaaaacaaatacacagcaaaatgcctctagatttatttatttatttatttatttttgagacagagtcttgctctgtcgccaggctggagtgcagcggcgtgatctcggctcactgcaacttctgcttccctggctcaagcgattctcctgcctcagcctcccgagtagctgggactacaggcacgtgccactgtccccagctaattttgtatttttggtagagacagggtttcaccatgttggccaggatggtctccatctcctgaccttgtgatctgctcccctagggctcccaaagtgctgggattacaggtgtgagccaccgctcccgacggcctctagatattttgagtgattcagcaaacctcctaaagttgaccccgtagctggggtcacagtcctctttctccttcttccccctacttccttcttatatctggctatctgggagagaaaaaatttaatacaattgattactttttagaagagttaatttttacttattactgtggattttttgttttttaacagtcacaccgaggagaagactcagtgggaacatccaaaaactggaaaaagaaaacgagtggcaggaggtttgtatgttgttgtctaaggatcttggatggaagcattaagtagatgaggaaatgtcactggcagagaggtgacaggttattgtgtgtttagggagggctctctggtagagaaccagactcccactctgaggagcttatgggatttggcagaagaagatgatgagatcatagggtggagtgaggatgatttcttactggtcttaaagtaccaaaatggccagatgtggtggctcatgcctgtaatcccagcacttcgggaggccgaggcggatggatcacctgaggtcaggagtttgagactagcctggccaacatgttgaaagcgcatctcttctaaaaatacaaaaattagctgggcatggttgcatgcgcctgtaattccagctactttggaggctgaggcacgagaagtgctcaaacccaggagctggaggttgcagtgagccaagatcacaccactgcgctccagcctcggtgacagagtgagatgctgtctgaaaaatagcgacaacaacaacaacaaaaaccagaaaataattgaggcctttgattcacagtttatgatgttttcctatcgttgcagtgtttataaaattgttcttggctatactatggaattaaatatataagtatttggaaatttcgtaaagattaccatgacttctaggtgattctgagataatgtatgatccacggaatagaagtataagaaagggacaggcacggtggcttgtgcttgtgatcccagccctttgggaggcagaggtgggaggatcacttgtgcctgggaattcgaggtgagcctaggcaacatagtgagaccccatctcaaaaaaaaatatgagaaggttcctgcccttaagaggtttaggatccagctgaagaatcaacatgtgcacatgaaaaaaaatggccgtgccctctaatgtcatatgaggtcagcgtatgaatgacgttgggtgcctgccctgcatatacatatgttctttgagctcattcaagggagaattcccatggattggcacaaccagtatggtttatagagcgatcaggaataaaataggttttcttcaaaacaagaggcaaaaatgtggagcccagggtgggatcaggggccttctgcagctgtcgcagttggaacatgtgacgaaagccagttgatgtgacaactgctgggtgggagggacaggcttgggggcggggctgggagggctccttcccttcctgacccagggatggtctttacttctccctggcacctgtagacctgtctttcttgtgtttcagatttgccatacggatgggaacaagaaactgatgagaacggacaagtgttttttgttgagtaagtgtctgcaaagaaaccactctcagctgttttgctttttaataggaatttttaattataaaagtaatacatagtaactgtagaaaaatacaaagtataacagtgtgtatctgtaatcttagcagaagtgactacttttaacatcgctggaacttttaacatcgctagatttattcttctattttccccgcacacgcatccttaaaaaaaaaaagtagggaggccaggcatggtggctcatgcctgtaatcccagcactttgggaggtcgaagtgggtggatcctgaggtcaagagatcgagaccattctggccaacatggtgaaactccgtctctactaaaaatataaaaatgagctgggtgtggtggcacgtgcctgtggtccctgctactcgggagggtaaggcgggagaatcacttgaacccaggaggcggaagttgcagtgagctgagatcgcgccactgcactccagcctgggtgacagaatgagactccttctcaaaaaaaaaaaaaaaaaaaaaagagggaatgcactgtgtggactgtttagtaacctgctttttccatgtaatatattatgagcattttcttgtatccatatctatttttcaaaaagatgctatttagcagctctagagttattattttgtacagatatactataatttatcaaattgcctattggacattaatgctaaattcctgttatagagaacctataattataaataatgtattgagcatccttatctgtaagactttttcacctctctgattctgtctttaggataaattccggtatcacgcagcaatagtaaccacctgtccaacatatagcatgagccaggcctgattctaatcatcttgtatctgtagcattaggtcattggatccccacagtgccctgagaggtagtattgttattatccctagcttactgccagtgacacagacttgagggggtaagtgacttgttaaggatcccacagcaaagaagtagcacagccaggctttgagcccagcacctgctccagggactgtactcttgaccaccgtagttaagaggagaattaatgtttcacaactgtcaacatttaaattagaagcttgaatagtctttgacaggattaggattggttggttaatagaagttgatttgagcaggaattttttttttttttaaagttatgaatgtaacataaacgtttcagtatttgattcaagtacaccaacatttaggggtcgggccagccctcctctgagtgtgagtccacttgcatggatccagtgtggtcttccttcccctaagcatgcctgtaacataacatctacaatttctactttcattttatgtgggcgaaagagtacctaggtgccgaggcaagagactgaaggcacaaactgtttcagtataataaagaaagtagttagaataagaatagtcataatacaggttagatatggagatgatcatggacaattatcaatcattactataaacactattaatcattagcttttaatattactctttgtggcattactaacataacctaggaataactggcatgtataggctcaggtgctaaagggacattgtgagaagtgacctagaaggcaagaggtgagccttctgtcacacccgcataagggctgcttgagggctccttggtcaagcggtaacgccagtgtctgggaagacacccgttacttagcagaccgcgaaagggagtctcctttccttggaggagtcagggaacactctgctccaccagcttcttgtggaaggctgggtattatccaggcctgcccacagtcatccggaggcctaaacccctccctgtggtgctgtgtttcaatggtcacgtacgttgtccgctttcatgctcctcccgtactcctggttcctctttgaagtacgtagtagatagtggtagaagaaatggtgaaagttttaaagtctttgatctttcttttaagggcagaaaagaaaatgctgacgtatgctgccttctctctctgcttcggctacctaaaagggaagggccctctatcctgtaatcacgtgacttgcttcaccttgtcaatcacttagaagattcaccctccttaccctgcccccttgtcttgtatgcgataaatatcagcgtgcccagccgttcggggccactaccggtctccacatcttggtggtagtggcccccaccctgggcccagctgttttctccttatctctttgtcttgtgtctttatttattacaatccctcgtctctgcacacggggagaacacccgctaagcccagtagggctggaccctacaactttaaggttgagcaaacacagtattttcaaagaatctgattgctacatcatttgggagttttatggtatttttctagcattttcactgtagttgattgaaccaaaactttttttttagctgcttgtctttgaggctctccaaagcattcgaccacattttcatagataccactgacactatttttcacctcccatgttatcagtttgtgtaatagtagcttgctggtaatgtagttacagtaacaagttcaaatgacatgtgtgttttttgagcaaacctggtgaacttttggtgcaaaactgatattgagagcaaataggccaaagcttgcttgagagaagtctcccaggccaccataggcagccccaggaagacggggctgtctagcagttggataggtgggagtgcctattatttgttaaaaggctttttgcctaacttgtgaaagttttttttcctcaactaattaagggtatcaacgcattggttgtatgttgaaaatgttgaaaatgttttttttttttttccaagttttctttctttttttttttttatactgggtcttgctcttcttatccagggctgaggtgcagtgacacagtcacagctcgctgcagcctcaacctcctggactcaagtgatcctcctgcctcagccttctgaggagctgggactacaggctcatgctgccatgcccagctaatttttaaagactttttttttgtagagactgaggctcagtatgttgcccaggctggtcttgaacttctggccttcagcgatcctcctgccttgacttcccaaagcattcatattacaggcatgagcgaccacacctgactgaatttcttaaattttttatgtagtcaaatcaattttctcctgtgcagtctttgcctttgcattcacgcttggaaagttactccctgaaatgggtattaatcaaccaagagcagcagttctcaggcatggttcctggaccagcagcattaatatcacctgggaattcaataaaaatgtacattcccaggcccccaccccagacctactgaatcagcactggggtggggcttgcaatctgcgctctaatagtcatccaggggatcctgatgttccctagcttgagagcctcccgtctagagcaggggctgtctcctttgcctgtaaagggctagataatatgttttaggatttgcagggcatatggtttctgttgcaatgattcaactctgcctttgtagtgctaaagcagctatacacaatatacaagtgatgggcgttgttgtgttccaataaaactttatttacagaaacaggcagtgggccagatttggccagctcctggtctaatctagaggagtaagcaagggctttggggggaacctggaaattggctcccctggctagttctcacttttctgagcctgttgcagtggggtgctggtaaatgtttagcaccaggtcttcagggggaaaaaagccactgtttgtttccacagtataaatactttggccatagctgatttcatgctgccaaggtgaagtgaggaattgggaagagatagtcacgtttggctcttgtaagccagtttgagccagtctagcatagaactgctctgttgtgtgtgtataatattggggtcacaaattaaggttgttataaatagaatgaggatgaggatggtaataattagaataaaggttggattattactcttgagtcttggtacttatagggagatgagtatatattttaaactaattttacacacacatacttttaaaatatgaaatttcatctatatttagaggcttcttaatagtttttaagatattctgaggtctttatctcatatcccaagaatacatttaagatataaaaagtaaattctattataaggagtactcttttcatccatatgtgccttttttttttttttttttttaatggttacccagggtcttggtctgtcacccaggctagagtgcagtggcacaatcatggctcactgcagctttgatctcttaggctcacgtgatcatcctcctacctcagcctcccaagtagctgcgactacaggcgtgtgctatcacacttgaaattttgtttagtgtttgtagagatgaggtctaactatgttgcccaggctggtcttgaactcctgggctcaagtggtcctcttgccttggcctcccaaattgccgagattacaggcgtgagccactgtgcccagcctccagtatattttaataccatttctacaagatttagatcaattccaaatcaaaatgagtgctcgtaggaggtatgagtgcagagtcttaaaatgaaaatcgttagaattttggtagttggcaggtttcttatttacaactaagactttatcattttgagttttctacttctctacgtctttaggcccttgcacagggctaagagatttaattgaaatctactgaaaagagtggctgacagatcttatagctacatttacatgaattacataaaagcccaaaaccttctcaagaagccttttttgagatctaaggatacatggcaatagttattgtatgttacagcgtatgttataggcagttctgaaggaaaggattcgatgactatctttttttggcacaaatgtgatccttctggaggccagaagatagattcagtgggccccagttctttcaggtttaaggaataagcattttggtctatgaaaaatggggttttcctaaagtataagattgtcttatatttataaatgcctgtgttcattgctgtgggttcactgctttctcttttgggcagccatataaataaaagaaccacctacttggacccaagactggcgtttactgtggatgataatccgaccaagccaaccacccggcaaagatacgacggcagcaccactgccatggaaattctccagggccgggatttcactggcaaagtggttgtggtcactggagctaattcaggaataggtaggctcttcacttagttatttatctttgggactgctataatgagatccacttagatctagctataatggaattttgtttagtggttctctgatttaaacatgacttttatccttttcagatatcgtttcattaacatcactacctctttttaaatcctaatgttgtcatggaagcctgtgtaggggctgaccttgaagtctctgaaagctgaacactcagcaaaagactgtggctattttggtattcagggatgagagacaacaggctccgtctaagagtttttgacctggtctgcatggtgtatgggcatattccaattacctgggttattcaaaccaaaattgattggtaatagaatacggggaacaacaaggtattatgtctttggaacaaaggatactacaggtttcgactggtcactgagcatatcattttcttttgggcacaggatcttatttctctataaaattggagaatgagttcctgtcttcacctcttaattgccaatgtttacccacagggactatcatgggtagatggctcaagagggtatccttgcttcaatatgatgggccattaaggagacaggagcaaggcgggagcaaaccataactcttcataggattttattctgattttgctttgatctatttacataagtatctgaatcagtgagaaccacctgctttgagtttagatatgcatcttcagatttgtcgacatatgaaacgttgcatttggctgtcttctgtcaagttctctctgtccttttggtcccccgcagccctcacacggcccccttgatgccctcctctactcatttgtttctctttcctaattttgtttttatttttattttttgtgggtatataaaggtgtctatatttatggggttcatgagatgttttgatacagggatgcaatgtgaaatagtcacatcatggagaatggggtatccatcccctcaagaatttatcctttgagtgataaacaattcagttatacccttttagatattttacaatgtgcaattaagttattattaactataatcaacttgttgtgctatcaaatagtaggtcttattctttctttctatcttttttgtacccattaaccatctgcacttctttcttaattttgaacaattccttgaagctgcagaaatattttctagcatgattagggaggcacaggaggtaaaaatacattgttcaagggtcaattattgtgttgtacaaggtgtgaaatctaccaggttgccatccgagtggagaatttttttactgtacttgcctatgaaggtaaagaagcaaatggaaatttttttttaagaattgaaaggattttatttcaaatcaactctcatacctcatcctgggctccaaatatgttcaatccacttgtctgaacttctgcattggagtaaattttatataattgtcattgaagtcaaaactgatggcgtaatatttaaaacaatggctggatccccaatctaagaagaatacattttgttgatcatattaagtactgttacagtgaatgcatggacccatacaattgtggaataattaagaaaaaaggacttaagggcttaaaaatgtctttttaacaatttaacaagttagccagaaactttaaagatcttattctcttaatcttctagctagactctttttctgtaatgagtaagatatgtgactactgattgttttttgtgttaagtgttcgaactgctccatgtgacattagatagcagactcttgaatagagctaatgctctttcaaagatttgcaacagcagacctgcgacattgtaatccaggactgatagagttggttcagaatattaaaagggtgatatctagttagatacataagtcttgatggagaggaggagattctgaagcattgagaataaatttgtggttgctgagaatggccctcacatgttggagtaaagccagaaactctttgtgcctcttcacagctcccacttccccctaagactcttccttcctgatacctataattcattttgtggacactgcaggaggtgtctgcggtccagttggaggttgtggcaaattgtaacgctcaggatggcacagatgtcgcacaaggtcttagggagaccagcctttcctattcaagtgcccacagctctttccccagctgtcaccttccgcaggaatggcctttaacactgtcacctcaccccattcccctccactcttgggaagcatacgtctaggtgagtggtgaagatttttattctgaatttttgaaataatatcgtactgcaagttccaggcaatcaaaaactcacaaatcacttgcactctgcagcagtggtatcaggtctgaagaaaggaagaggctgcagataggcacatggctttgctaagttagcttttatatcctgcgtggctgccttagaaagtgtccttgcccaagtaggctgtggcttctagataaagtccttctactaagctatgaaacatgccaatttataaattgctatcactactttagttccgctcatttaaaatgaaatagctgaatgccgagtgagtgaattgggcatctttacttccaagacttctggggcattcaggagtcatattctatctaagctttaatggtgttggtgttccctttcctttggccactcaagggagcctgttttctttggataaaccgtgaaatctttaaccctgtgaatgtccgttttctctaaggcggggtgggctgaaacataacataacaggatttattttgaaagtggtgactccacaataaaaacatagatatctaatttgccttacaaaggccgatttgcaaatctagtatttccagtggttctttctttctttctttctttcttttttttttttaatgccccatatgacgctgctttgttggaattgccattggtgaggatctcactgataaagaaggggacatccctcccttgatagactttagggttgcactagagccatgccccctttgaagtggcctctaagcaaactctgtcttgtcatcattttcctctctgcagctgtaagtgatacggagctgtattttgagtttttgatactgatattactaaggcaattggagggattcttaattcatctaaaaaaaatcagggattctgacagataaaaggatttggaggaaatgtcagaataaagcattgtgggttcatgaagtcctaggttttataattaaggtttataggcaggtattaccgctgctgactggattcaactgtctggattggagatgaacaaactgccatctctgggctaactctgacccactgcctgattttgtaagtagaattttttttggaacacagccatgcccatttattcccattcctataatgttgaactactgtttgtgtatattcagttatcccaaaataatatggccctttgcttgttaccagaagagtcgcccagttgtggcagagatcatctagctcgcaaaactgtaaatatttactctttggcctttcccagaaaaaagtgccgactgctatgttagatactccagttcattgaaagtgatatcaccctaacattctctaaattagccacagcttagatgaaatttaggcaaatggaatgccccaggccccaggaagactgtggcagcacattgtatgtaactgttggggatgttgcctgaaacccccgccttttttttaggcagctgcaaggattagaatgttgcctcctcagaaactaacactcttctctccttgacctttgtttaaccagctttctgaacctgaagaactttgtagattgaaagctgtagcttgtggacctctctctgtggagatcagcatctcagtatccagggggaagccatctcttcacccaaagcttccgctaggagatcaagaggcccggaaccccgcagtcctgaatgctaaccagtagagacaagggaggaattcatttctgtttgtgttcaacatagactgagcaggaagggccaggtgttttacgactctttggagttagcagcttgttggctctgatttggtaaaagcaacggaaatgccttcagcacggtgaacattacatgcaaatgttgggaagtgttaggaaagggaatttttttaggcgagggaatttcgcattgaggaaggtccctgcttcgtttttagacacagcctatcagtcagctaatttggctatgcatataaatactttagtataaaatgctgccccctgctacctgcaggctgacatgttgctcatcaaaggcaggatccttctaatgagggattagttggatgcctaaatgtgggaccacctactctgttcattgtcttaattagctagatgtttgttggagcgcatgcaaattattttctgtaagcagacagatttattatcatatttacggagtgacatccagggtttgtgagacatccattaaatttttttttttttttaatgtttgagatggggtctcactgtgttgctcaggtgttggtctcaaactcctgggttcaagtgatcctcccaccttagcctcccaaagtactgagattactggtgtgagccactgtgcccagatgctattagcaagtatgaacaaattagatattttcagtctactcttctgtggtaatgatgataaaacttcttaactttcagtcctaaaccagcagtggctaaaacttgatttttaaaatttttttcagagtttggtccagatgaagtttctttcaccttgcgaacctttagaacgctgggctgcatcatgtgtgttgtaactttaaagttagaatagcctagcttcgttacagtttttgagccaaaggacccattaacagaaacaaaactttttttcctgcaaacaaatacaagctggccacactggtaaataccagtgaaatatattttgggactgacacttgcattttctattggtacttatgtcacaaaatcacctctctaacgtgtattacatggacctatatatatgcatacttacatatcaaaatgtatatattttgaggtataaaaagtacgtgctcaaggtattggtcactcctcaatttgttttccttgaaacaaaatgaaggtataaatatttcagccgggcgcggtggctcacgcctgtaatcccagcactttgagaggccgaggcgggtggatcatgaggtcaggagatcgagaccatcctggctaacaaggtgaaaccccgtctctactaaaaatacaaaaaattagccaggcgcagtggcgggcgcctgtagtcccagctactcgggaggctgaggcaggagaatggcgtgaacccgggaagtggagcttgcagtgagctgagattgcgccactgcagtccgcagtccggcctgggcgacagagcgagactccgtctcaaaaaaaaaaaaaaaaaatttcatgcagggaatcccaaaatgtaattatagtgtgatgttgaaattgattgtcttagcttagagagcctactttttaaaacttagggtcttgtttctaaatcatgtgttgaaattacagtgtgaactgtagttgccatactctttgatcctacaaattgtcaccacgatgaattcatatcttgtgcaaattttaccagttctacgtgaatagaagaaaattactttttcttcatgtagagaagggtattcattcctaagattttaaatccacacttcccaattatggactacgccagcttcctttacacctttgcttctttgttttcttttccatacctaaatgttactaaattttgcctttgagcctaaagcatgtcattgatggtttttttttttctagttattccaaaaggtcccataaatctggggccatagctaacttacatttagtcattttcatgggtaaaacacactcatatgagatcattgcacttgggatcttgaaatgcctgattagtttcctttctgattgttgaccagacttaaactagtgggatcttggcatttatctttttaaaaacctggtgctcattaaggaaaggaaaatattctgaaataatcgaaataaccttttgggcattggaactccattttaaattaaaaacatttgtgcctactattatcttatgctaaattatacccaggtattgtaagtaaaattattttgaagttactttgttctaagaaactatggagattcttgacagtgttagacaaagtccttaaatgacattatataaaaattgagaattagtaccttatgacttaaccattttacactgagatattattggacattgagtgtacatggaaatcacgtgatcaaagtatttgagaagtaaatatctaaaggaagagaccaatttaaaacattctaatgagcatcatctcataatttggtaatctcatgtaaaatgcttataataggggtgtgtgtatgttatatatatttttaaaataaatttgtaatcatgtatacagtagtccccccttatccgtggtgtttcagtttttttttttttgagtcagagtattactctgttgcgcaggctggagtacagtggcgtgatctcagctcactgcaacctttgtctcccagggcctggtgattctcatgtctcagcctcctgagtagctgggattacaggtgcacaccaccactccctactaattttatgtttttagtagagacaaggttttgccatgttgtccatacaggtcttgaactcctgacattaggcaatctgcttgcctcaacctccccaaatgctgggattacaggtgtgaaccgctgtgcctggcccgtgtttcactttttgaggtttcagttacctgaggtcaacaggcatctgaaaatactaattttgagagagagagagtgtgagagaccacatttacataacttttatacagtacattgttatagttctattttattattattgttgatctcttactgtgcctaatttataaattaaaatttatcctaggtatgtatgtataggtgaaagcatagaatacatagggtttggtactatccagttttcaggcatcactgtgggtcttggaacgcatctcccgaggataagggggggctactgtcagtgtgaacctgattagatctcaactgaaacttttttgtcacatgaggccatcagttgaatttcatgcctgcatgtaggtttagattttaattacttttttatggtgtcagcataacaaatgagagtcatacaaactattgtttaatgacaaagtgggtcaaacccataattaaaaaaattaataatagatttttgttctacttgaggttttgtagcattacgtaaagcttgaaaacttggaaattgttttacttaaaacccaattaaaataatttgatcttttgcttttacatcatagagtggcacaataaaaattgtaatggaagatgttattttacattttttttctttttttttttttgagacggtgccttgctctgtcacccaggctgtagtgcagtggcgtgatctcagctcactgcaacctccgcctcccgggttgaagtgattctcctgcctcagcctcctgaatagctgggattacaggcgtgagccactatgtccggctaatttttgtatttttcgtagagacagggattcaccatgttggccaagctggtcttgaactcctgaactcaagtgatccgcccaccttggcctcccaaagtgctaggattacagacactagccaccatgcccgggggtgttgtacatatttcctttaatctaaaagcagaaccatctttatatatttttatttttttccactagagggctctgttgccctttgatataattaaacaaaagaggcagcattgcaatatagttctgttcctctcagtccatcttgctttcattttggttaaataatgtcttttacttttctaacatatcttttaggtcttctaattctctgtgatgaagttcaaactgaagactgttactagtgtcgtgtttgtttctttttctctctcttttgttttgtttgtataaaatgccagggatgaagggatccacttaataaaaaggcccattgtgttcagggagcagcctgttctgccaaatcacacaagggcatgtgttttcatgacattattgcttttgagtgtgctggcctagcaataatatgatttttttttcctaagtggaaattgtaatatttaagtattaatacctctgtttaaggttcattttgaacgccttggtgaccctatgtttttttctttgttttttgttttgttttttttttttttgttttttttttttgtttttttgagatgaagtcttcctctgttgcccaggctggagtgcagtggcgcattcttggctcactgcaaccttcgcctcccaggttgaagcaattcttctgcctcagcctctcgagtagctgggagtccaggcacctgccaacacgtctggctaatttttgtatttttagtagagatggggtttcaccatcttggccaggctggtcttgaactcctgacctcatgatccacccgtttcggcctcccaaaatgctgcgattacaggcgtgagctactgcacccgcaaccctatgtttttttctaagaatatagtgtcccttgccccctgctacaagccttacccagtgttacataatttattgtaattaaattgtttattaatgatacattcttgctgtagaagaaaacgtgtccttttgggctcagtacagtatatgtttcttaagtaagagggatcatattaaaccagctacttaatgtgaagcagatagccagtgttctccatgtacaatcttagggagggtaatttttgttttggctgtgtaattatggtttgaggcagcccattaatcgcatatttcagctgtcaaatagaaatttggcccagaaaggaatacactttggctttacaaaactgcttattttcaaatttttaaatggggacaaaaacgaatatgctatattatatacttttatttatataatttttttttcagcaactttttctcttttgaaaatgcaagagcctgaaaaacattgtgaatatacttgtaacattgcaaagctatttcaccagagtaaagatattttggttgttcatatacgagtgtgttcgttgtttatctaataaattgttaaaactagatggcgattctgggaattattatagacttcataataaataagatgctgacagttgaaacccccttgaccgttgcctgtttggtatgacacagaccttcttggacttttgtagcctatacatgagtagatatgaatcctcagccttctccaaaataaggttggggtcactaggaggccttcttggaaagatgtcttaaattaaggcaccagtagatggatcaaaaagcaggttccaatagctcgcttttagtttcttgcctaaatttgtgatctccctttggcttcataaataacggtacatttcatgaagagctggtctcagtctacacaagcctaactgaatggggtgcataggaagggttgcattgtgtgacaaggtttaaatctaattgttttaagtctttgagttatttgctcaccaggctgtgcttgatggttttactttttgtgatttttggagccttcatgttagaagccatagtcatatggtgctctctgaaagcaagacaaggtttcttcactagactctaagaggagatctgagacagagagatgggggcggggaggaaacctatttcagtgtctctactatttctacctaggtggaggataactagccagatgaacggagctaagccttttgtatgaagtttatttcatataaagaggaacaaaatcagaatcaaatttcttctgtagttgcacagaaactgaagttaaagctaatacaatgtttttcatttttacccttacctctacaatgtacttaattgttacagattcgtatttattgattatcatgttgtattacattgatagccgtttaaaatttatgaagattccgtacttgtcatatttaattctcagcaccgtgcttacagctgtcttgtgataatgtcgaaaggaaagagaagggaggtgaggtaacgtgcttgagatcatacaggtcttgggcggcgggtgcctgcaggatagatcaaagggtaattgagtctgtgcctggggccccttccactgtacatgccaccatcctgttgggaggaataacagcacactcctgaatgagctctttctaagcagctcattcattttgttaatcctgagtttggaatcaaccaatttatttaaacccgtgaagcctcgctctgtgcccggtcaagtgctgggagtggcatctgcggggagggccaaggcagatgtcatttccagactgcattggatcctggattcagaagctgaagcttaggagtgggcatggtggttcacgcctgtaaacccagccctttgggaggctgaggcaggaggattgcttgagctcaggggttcgagagcagcctgggcaacatagcaagaccccatctctaccaaatcaaattttttttaaaagctgaagctttctttaccaaaaccactttggtattatgattgtaaaacaaacattaaggaataagtctgggggaatgggaagtagcattcatcaagcgcctgtatatgccaggtgttaggctagattagcttgatgtgccttctcatttaatataagtaattattttaaaggttattgtgattaacatgtattccttatggaaaatttagaaagcgaagaaaaataaaaataagaataaaagatttaaaaaaaccccaattcttaccagttagaagtatactattaatatttagcatgtatgattgtaagcatgttttcccttctttcgtgatttttctatttaaattgtgattatctttctgtgttgttaaatactccacatcttaaatggctgcatagtattccattatgtggttccagctcttctcccagtgtggtacattcgggtggtttccagctttttaatagctgtggaatggagaagcacattttgtaattaaatgtttgtacccatccgtgactcttctatagttttattttgtggaagtggaattgctgaatgaagtgatttgctccccaaccttaatatcttgatttgttttgtcaaactgccctggaagattgtaccaatttgaatgctcctttgcccagcatccttgccaaacttgagaattagaatttttaaaaaatatcacttaaatttgcctatctctgatgattagcaagattgataggcttttcttatgtcgggccatttgttttttaacgaattgccctttcatcttatatgcatgactattggatatgtatcgattactaattgattgcttgcctcatgtgctatcatttaattttcaaaatgtcccttagaagttaatttataaagtgtctattactttaagtacctgttcaatcctgtgatcaagaggaaattcacagagaaagaaattggcctaactcctcagtttgcttcactaaaatcttttaagcacacatcttgtctattatgccagctgcaactcaaatcaaaggcactgttgctttggtacccgcatttaaggagggaataccccaaaaaacttaaacttgtctggctttgcaatggtggtggagtcccaagatgacacagtaggcaagatttgattactttggttatgcaaatttcccctagatcttctattaatgacagtaacagcgcttcagagcttttctatgcattctctcatttgatgagcctgctttcaggtggagaaattgtaccattgctgaaaatagcttcgctgacagttagggcaagcttcattggtagcaagtttctatctggaaagatgtaggagaggaacactgactctggaagcagacgtgacctagttttgaaacctgggataaccacttcctatctgtatgacccgagcaagttactttccttctcagaactcctgttccacctctgtgcaatatggacagtactcctactttgcaaagttgttaaagatgggaactccagagtgcccagggaattgtctactcatcattgcaggcgtttaataacgtgtagccatttctggaatgggaggcaagaggatcgagttaccagtgaaattagtttggtattttcctagcttcctggttcccagatcctcaagaggctgccataatctctgtgaatttgtcctaaaatgacctgtataaataactgctttagacactggcttgtctttggtatgaaggaaaacattttagaatttttttggctggaggtcagtagctttcatccagaaaagaataatcaacggaaaaaaaaaaaaaccaccgagacgaggttatttttgttacagtcaaggaacaaaaagggatatattaaacttgggggaaaaagagaaggaaaactattattctttaaaaccgttataccatgcatcatggtaacatcttttttactgagagttctgcattagcacacttgttcacccaagtttgtgatagtttataggactgcctggtgtattaagtagaaatgctcaactttgctgtcctatttttttgatcatatccaaaaagtgtcagtgtttgaatatagttttattgccacttaaaaaggtaggacagttttattggcgtctactggacatggtaggaagagagctgtaatttgacacagattgtccttaacttgggtgacttaaggcaagtcacttaaccatctgagccttaatttcctcgtttgtaaattcaagagaataataacttctctgtcacatactgttttgtacagatcaagtaaaacaatgtgtgaaatgctgtaatgaagaagtccaatagtgtatgaatataaggttgctggcgtttggggaaaaatcatagttatagaagaaagactcctaaagggaagattagggttggaagaagatggaggaagagagtaatttaattccttaatggaaagaataaaataagagctcttgactttttttttttgttgttgttaggatatggggagaggtttctgcaaatatcttcttcagggtttacgaagtgaaccggatgtccggtaacagggttgcatgtcatgcaattgactgggtggtgatgactaaaattttaatgatgcgatctcatttaaagttgacaggctctgactctagccagatattcaggagcagaaacttgattcaataagaagggaacctgcagaggcagaaacttctgtgggttgcagttgtgttgagattacacaggtggaaatgttgcgagttcttgggtgatgcgatttcttcctgcttgccttaagtttcacctgcccaggtccttacttctgctcacagtgcagcacgaatttagatactgattggggattcagacacaaacgggatgctccttgcttatataacatcaacagaattgctggccacatcttgattatagaaactctttttcctggtgatcacacaaagcaaaagaatgaaaataatcaatctctttcaaatggagagactccgctgtgtcagccaccattggctataaggatgaactctcaaaactttttgtatcttgcaatataatgtcttccaactgcctttgattttactgtgtggctgtgtgatacagcaaggcagctgtggcttctaaattcagcagctaggtttgagaagcttctatcagctgagagatcatcagtacattccaaatggcattaaaaatgctgttacagctttatctattagcaaaggaagtttcaattctaagttcacgtacagttactagattgagtgtttgacaaggtagagagctctgtagtagatccatatggggaacatctcagtcagggtgtggagtcagatttttggcaagggataccatcctttcagcctgaaaagctgacttgggagctgtcagcctgtgtgcacgaggacctttttcctcccagggttagcgtcgccacttgcccagtgtttcttttttatttcctgctggcctgatccgggagggatttgggaaagctagtcttgttggtgtgtcatcatcgcgacgctgttagtgattgacttacccgagtgtacacatgtttgcatctcacttgtatgttccttacatgtttacttaattattgggaaggtgtattaatgtcctgttgctactataatggaccaccacaaactcggtgcttctatgctgcaaacctaagattataggcagtcataacacagtgttaagtatttgtgtatctaaacatagaaatggttcagtaaaaatacagtgttgtaatcttatgggactgccgttgtgtgtgcagtccattgtcatgtgatagtgattaagggaggtggacatttttgtgtttgcttatttccataagctcaagggtaaagcttcccaatcagcctttaggacagaggtaagaactggttggtggcctggagcctggatctggcctccagatgttttttgtatggaccacacaaaaatggtctatagtgggattttttttctttttttttttgtcagactacttgccagcatactaaaatcaggatattttacttaaatgtagatttatgacagttttgaaaaatcagaatgagtattgtagactaaatgtttatgtcttccccaaaaattcctatgttgaaaccctaatcttaaggtcatggtatttggacatggttgtgtccccactgaaatctcatcttgaactatagttcccatgatccccatgtcttgtgggagggacccggtgggagataattgaatcatgctgttctcacgataatgagtgagttctcatgagatctgatggttttataaggggctttcttcccttttgcttggcacttctcttactgctgtcatgtgaagaaggacgtgtttgcttcctctcctgccatgattgtaagtttcctgaggtctccccagccacgtggaactgtgagtcaattaaacctctttcctttataaatttcccagtcttcgatatgtccttatagcagcatgaaaacagactaatacaggggcctctgggaggtgattagatcatgagggtggagccctcataagtaagatttgtgccctgatgagaagaggatagaaaggtagctaactttccttaagctatgtgaatgtgagaacacagtgggaaggcagccatctgtaactagtaggagggccctccccaagaacgtgaccatgctgccaccttgaccttggactttaagcctccagaactgtgttaaagaaatgtctgctatttaagccactcggtccatgatattttgttgctgcagcttcagctgactatggcttatgtctatcaaggaacatagttgcactgaggttgaacagagctgttcctataggctgaccccctgtaggcaggcacaggctattttccatggtcagtttacctgcctgcttcctgtagaggcttgagcttggtttagagtctgcaatgaaaactgtgtgatgatattggactcactggctcatagccactgccacgcccttattcagtcttttgtgcaattaacaaacatttattgactactgagtaccaggtgctaagacttcagtgtagaaacaggcagggtccctgcccttgtggaggatacaaaacacaccaaaatgcagtcagcttcactgaatgacagagatatgatctgagaagtgtgtcaggcagtgtcatcgttgtgcaaccctcataggatgtacttacaaatcctacgtggtataacccattatacacagaggctgtatgggatagcctgttgcttccaggctgcaaacttgtatagcatggtaccgaactgaatactataggcagtcataacacaatggtaagtatttgtgtatctaaacacagaagtggtacagtaaaaatacagtgttgtaatcttatgggaccgccgttgtatctgcactccattgttgaccaatgtgttgttatgcagtgtgtgactgtaccagcagcttgatctttgtgcttctagagaacatttaaattgattcgcttttgtgagacagggtcttgctctgttacccaggcttcagtgcatcagcgtgatcatagctcactgtagcctctccctcctgggccaagtgatcctctcacctcagcctcctgagtagcttggactacaggcatgcaccaccattcctggctaatttcttttgtatttttaatagagatgaggtcttgctatgttgcccatgctggtcttgaactcgtgggctcaagcagtacacttgcctcagcctcccaaagtactgggattacaggtgtgagccaccacatctggcgaaactctgggtagtttctaattatttctgtatttctatttgtatttaaaagtacaggatactaaaatgttttttttttcttttttgagatggagtctcactctgtcgcccaggatggagtgcaatggcccgatcttggctcactgcaacctccacgtcccaggttcaagcgattctcctgcctcagcctcctgagtagctgggattacaggtgtgtgtgccaccacgcccagctattttttttgtatttttagtagagatggggtttcaccatgttggccaggacggtgttgaactcctgacctcgtgatcctcctacgtcggcctcccaaagtgctgggattacaggcgtgagccaccgcgcctggcaaggattttttttttttcatacttgaggaaacatctaacagcaaatatgttcttataagttaaaaagaacttttgctattttgaatgacactctcattaagtcttactactagtctctgatttttcttttttctttttctttttctttttttttttttttgagacagagtctcactctgtcgcccaggctggagtgcagtggtgctatcttggctcactgcaagctccacctcccgggttcacgccattctcctgcctcagcctcccgagtagctgggactacaggtgcccgccaccacgcccggctaatttttttgtattttttagtagagacggggtttcaccgtgttagcaaggatggtcttgatctcctgacctcgtgatctgcccacctcagcctcccaaagtgctgggattacaggcgtgagccaccacgcccggccttgatttttcttaacctttatttccaattatgcatcttctgagtaactataaagaaaagcaaaatctacagtaggtatggagtgagtgcagagtcaccatcagcttgaacaaatgtgtgtatctgtggtcaagtttaattgcttcttctgtaatttatattaatcacgcttccattgcttgccttttgttaatacgtatgcggccatgtgatgattttttaaaaggtcatccagtatcttgatgtccagtccatgcttataacctgagcagtttatgtactcttgagatggtatgtgctaaaaatgagtagctagtctgagtggcagccttacccattttattttgtgggcagatttcttttacagttctggctgggtttcttttagttggcttctttgctttgctcctgttacgacttagccctgtagctctgggctcttcgattctcacgtgctgatggtgtagctgagctctgctaatgctggttattaatctgacaatctataccagggaggttttataattgccataattcttatttgctccattccatttcccagcttctcaaatggggtggcagctgcaaagcacagtatttgaacatgaagtagagaatcgtcacttcagcttatgattttacattctgtcaaggctgcagggaaagcggtcatgtttctggatggtatttggatctacaaattccaagcaaactttttacttcttattatgtaaaatggaagggttagccaaattaagatctcaccatcaaccttgagggagtgacttctacatgccgtgtattactggttataaagctagtcttgtttggattgaagaatttaatcatatttaacttttcaaaggatgctttttaaaaaaccttatccgcgtgttatgtttaaactgagaagtacctgaaagtgaaaattttatttatttttactttttttgaaagatggagtcttgcactgtcacccaggcttgagtgcagtggctcaatctcggctcagtgcaaggtccacctcctgggtaaaggagattctcctgcttcagcttcccaactagctgggacaacaggtgtgtgccaccacgtccagctaatttttgtatttttattagagacggggtttcaccatgttggccaggctggtcttgaactcctaacctcaagtgatctgcccgccttggcctcccaaagtgctgggattacaggctcacgccaccatgcctagctgatttttgtatttttagtagagatggggtttcaccatgttggccaggctggtctggaactcctgacctcaggtgatccacccgcctcggcctcccaaagtagtggaatcacagacatgagccaccatgcctggcctgaaataatttcaaattaacccctgaggaacaaatgctcatgactttcaatgaatagaaaaatcagactgctagaacctccagactgcatgtcatgcgtagaagtagaatcctggggaagctagctcacaaaagcaagggagatacctgcaaggctgagctgagcttgcaagggaagaaaaatattagagagttgtcacatttagaaataagtgattccaaatttacagtcaatggactgtagatgccttccatcttcttaagagattttgtgcctcttgcacaggtattatccctaagatgtgttttcttcaatgtacctagactgtttccttaaagaattgcttttgtatggtacggctctatgtgtctgtgtttctcatgttggttaggagaactaacccttgtgacgaataagaaatggcaaacattgttaatgttgactttactagttgctcaaatattagcattggattttagagtcaacatgctagcaggatggctttattttaaaaccatgtgatagaaagctatctgctattattgatagcatttctggatggctgtcagaagtctttctttagaaatttaaccatatttttaatggtgggcattgcagtcaacaatagtacagactttgcaaagactatttttttttttgggtgcagtgaatacttcgcaatgcctgctgaattttacctattctgtaagtctttttgggaaccgttgagcccctcttctcttagttgcctttagcctttgtttttattatgacaattggtatgaaatttttccttttcattacttcttttattcagagcacacctctggcttatctcttcattctctgtttagtttcatattttactttaatttctgtacatcaatatctgccattatagtatttaagctcttggaaacatcaggcatttgttaacttgttgagaaaataaagcactccactgttgttatgagctgcttatggcaagtgaaaaactcacaatatttggccaaacttgggatcatttaggtgttgtttgcaattaatggcaggagatattttccttgttgttaagagtataacgttggttttagaaagcttgatctatgtttttctccatgttagatgtgaaaagaaccaggagagtgtgaggatattggtaatattgtcatatggtgatcccactgtggatagatacgcaagagagaaaatccagaagaaagcatttcactgaagcctggggacatttctggtgacaaatggtgctgatggcacagtgagaacgggagagggcagaagcaatgcacagatagaaagggtgtcacctgcgcattgaaaaatcccagtgccataacaatgcagtccctgcaatacagacaaacctgactcccaccattcctgtaaatgaagatggggccttgctgagaaatagaggatgcagattccaccctcaggcttcccgtcttgggatgcagagaaaactcacccacgtgcaacaactcaagagtcgttatttacctagcaaagtgttcacatgacagtgtttgaaatgtaccacgtgccttttcatgtttagtttagagcttgacactagagctctactgtggtttaccaagtgtgagggactatttctttctgagaaggaggggaagctttagtttccttgaatgtctaatagagtctgagtttccttttagaagcataaaagacgtacagtaggcagaatctggatttttaactatacagttgctgaagttatcttcaattcaaatcttctaaattcaattttgttaatgttgtttagatattattatagaagccagctttactgacttctgcacatttaatcataggagattcttccattctgtgaacttagatttcttttttctatccatgacatttatctaaatcaggctttcttttctttctactaaatttttcaattaccaataggctatgagaataattagactgacagtattactgaaaaaaaaacaaaacaacaacaacaaacaacaaaaaaaacaccttccactaaaactgactcaaaaagataatagcagggaaaatgacatgtcgatctgtgattccttttttacttgtcagtccttttgggagttgaacatataagcacatgtacctctatgtgacttttgagacgtctagaatagagaattcacctttgtagctggaatttattcagcatgcaaatgtgggtgggtgattgttttatagatgcctggtgttgaatgatgggcagttgtgataactatatataaaattatattaaagtccaagaggtgcttttatgaggcaggctggaaatggcatccgattttcttatggctttttcatgtccattttgatgaatctatttattacttctataatgagtagtacacatggttggttagccaagttattgaactttatcaaccttggctgaaattcacaatgcgtgccaaacttgttgtaacatgtaagaaattacatctgggctaaaaggttcaataatgattactcttataatggaatcttctacaaagcaagggatttcatgatatccctatgcttttaaaaaattattgtgatacagtgaaacaaggaagaacgtgtagctggaaaaatagtatttgcttgtaatatacattcagattcataacaggcttatttgattcccaggacagggtgagcaaaggatgctgtttcctgggtgtctgctttggtgttcattgagtcatgtctctctctttagaccttactggatctagtcttcatcatggggcctgtgagctctttcaaatctagaggacaaaacctaataaagtgctgtcatatcacatctgtttatgagtttcaaactgaaatgaaatgtgtagccgtgttattcttaaattacagagacttgaggaacgtagagctttttactctcactagagaaatctaagcacaggttggttcgttaacctgtaaagagatgtttgggttttaagaggtctatcaaataacacagtttccctttcccaagttactacctaactgagcagtaagaccacccattaggcaaatggaagaccaaaacatcacctgagtcattcatgaagctgatactggagaatatgtatagctgtgtgagctggtgggctttctaatcctgaccaccacaattagacagggtaatgggtcagtgctaggtcaggccagaccttcgcagagggcagaccccattcatgcagcatgttcaagacagtgcaggagagcagggtgtgtgctctctgtaagaggagaggagaggcagagctgcgtgtgcccggttctcaatcctggaattaccattcacataccattcacaacataagttggatcagctcccttgagcaggaataagtgagtggcagagggggtcagggatgttaacgcaaatggagatcccttcacccagaaagacacatctgaaatggagaagatgcctttttcctcctgcaaccaataagagagtgatgaaaattatgacgccttgggaaataagactgcaacgtaaatgtgtgtccaccccctagttttcttttggattgtgaatcctcaccctccgataactagacgtgctgttttgacgtctatgctttccagcttgccaattctggggcctggcacagtatctttcaccccggagtctcagtttcctcatctgtaaaatgggaaccatgacgtcagcatcacagagttgtgagaattcgacaaggtggaatgaaagcaactagtgtggtgtctgaccgcttgtgttagtccatgaggaatttccttacgtattgttttgtgtctaggaccaagttcttattttcttcttatggatgacttcatatatatgccgccacagagggaattaccgtttttctttgtaggtaaaaaggagctgggttaagatgcaccgtcatatgaaacagggaaaaagggtttgcttgggttttagattcctgaaacagtctgctgagggattctaaagttgttgtggtctctgttccactttgggagtttgataaaaattggcctgttttatttgacagctcttaggtagtgtgcaaaattgtcaacagataataaaagttttttgcaaagctatggctctatgtgctgtacttgagcagtatccatactcttaatagaattgatatatgaaagcaggtctttttccttatccgtttagacctaaatcttatccatagtgtgtggatatcacaaacagcacaagaggaagtgaaaggaacagagtgggtgagcaaaccattgttcaaaggaaacagaacctcgctcaaggaaaatgagaattcttctgatcagcttctataatggatgcaatgaggaaagttgtctagcagactgttcttggccaactgtctaaatggctcgctgcatcctcttcacgagagctgatggtaggactgtagaagagtcacaaaacatcacatgacaacgccagtccctctgataatcctgcaagagccagcccagttttgctgacagcacagtctgctgtttaattattgtgtgttcaatgacttacctctttttagtttaattaaaattatttctcagattaagagccatgctatgatgcttgccaacggatatttaaaacatgtaactgatttgttttttataatgcttcaggagaactcagttgagcagtaaagatgtgctcgtgatgtggttagctcagaataaggatgtgaaaaccaaaagggaaaggaggacaggagtgaatctggcacttatctttcagtggggcctgagtgcaaattcttcctaccttccatatgagagaatagggaaaattaaagaataaatgtctctgggtttaatgcaactttactaaggaatgaaagtccgataagaatccatatcttttgaaagaagattttttaaattccttatttttcctttctgcatggtcataaaacacactggggacagcccaccctgagaagtcaccaggcatctgcctgccttcagtagcaatcacccaactgctgtagaccgtaatcaagctttcaagaaccacgtgcagcacgctgcgggagagtcccagcgaagtgcttaatgcgccactccacggatgtgagtggggagcaagtgctcaaaatggggcttctgaattgcaatcatcatttggcatctctattacctacagctgctcaaagatgttccccccatgcaactgtttcttgcaactcctaacatttgcaacgaggcctctgatgcagacaacccgtttatacctctgggtggttgaaaccttcatggtttgttgtaaagaaaggtacacagtcccaccaatcagaccgtatctagaatattacgttcatttaggggtggcgcatagacaggctaaaggatggcaaagtcattgggtcatgtcctaggagcaacccttaaaggaagagtgaatggctggttagttggtagaagaaaagatttatgtaaattagttctctcagtagctatctaggagagagataatcctagctttcttcaagggacagaaccaggaccaatggacaaaatctgcaaggaggcagcatttaactgattagaattgtcgggggtggggttggcgagagggtgttgcttttctaatgattcacattgtataaaaagcagacagtaggtctggcactgttggctcatgcctgtaatcccagtactttgggaggccaaggcaggtgaatcatgaggtcaagggttcaagaccagcctggccaacatggtgaaaccccttctctactaaaaatacaaaaaattagttgggcgtactggcaggcgcctataatcccagctactcgggaggctgaggcaggagaattgcttgaacccaggaggcggaggttgcagcgagctgagattgcgccactgcactccagcccaggcgatagagtgagactctgtctctaaatacataaataaataaaagtagagagtaagttttctgtattgaaaatgttttaagagttctttgtcttaccttaggttcctccaaaaacagaaccagagaaaaagacatatttatgcataatttgggatgtgattacaaagagagggatggggaattcaggaaggaaggagaggcaatataaaaatgtgttttttagttagtcattactagaggcaactagtgctcaactccaggcactttaggaaatgcatctcatagctgtctgcctgcggaataaagggcatttatccaccggcttctgaccccgttggacaagggcgtcccataagttttgatgtcccagaattttgggtttgcacatgtgcaagtgccaagcaggttcttgtaggcatcccatgctgcagagtcagagaatctctaggatggaaatggggggatccatattgtagccccaggtgaggccatctggttgcatttgtgtcaagttggttgaaaactgcatggtgagcgtaaaaatggtttgagtaaaatggagctgtgagaatttgaaggggtgcatgagaggtgcccgatacagtccaccccctgcaccatgctcaggtctcttaagagtaagcagaatctaccacagtgtatccttaaagttaaaaggctctctgatgggactataaatgagtcccagtttgatgaattctggggctttagccttttctgctgtggtattagttttctggggctgctgtagcaaagtaccataaactgggtggcttgggacaacagaaatttattgtttccaagttctagaggctagaagtctgaaatcaaggtgttggtagggccatactccctttaaaatgtgtagggaaggacccttccttgcctctttcagcttctggtagccctagatgttcattggcctgtggcagggtaattccagtctctgcctccatctgcacaagccattctccctgtatcttttcacatcatcttccctctattactgtttgtctctgttttctgatctcctcttcttctaagggtgacagttttactgggtgagagcccaccttaatgccctcagtttaactcgatgacctctgcaaaggccctgtttccaagtaaggtgacattctgaggtactgggcttaggacttcaacatatctttttggggggacacaattagaccaatagcaactgtgctataaaagagatgttgctttttatcattgatgctatccagatgcatagcaatcattcaacaagtcattcgaaagaaataggtatttcctgagggtctagtatgtaactcagctctgctctaggacctggtgattacagcagtgaacaaagtgctcctgcctacgtgcagcttactttcttatggagcatgattttcagaagtaattgttcttttgcctcgttatcatcagacattaggaaccaaggggggattgcctgcttttggatcacagagcaagctgccttgagcaagtgagttcgaattgcaaaggtgtttaagcatagcttggtggctgcttagtgaggatgttgcagaggcaatttaaatgccgagcagggctttgggtttgtgatggttaaagtccatttccactgcggagatggtatgattgtacaaatggacaggttctgggcctctgtctgttttgtcaagtatacaacacttctgtttatctttaaagggaacaaatagtgttttcacaggtctctgcttaaataaaaagattctagaccactggatgtcaaccccaccatcccccttctttttttttttttttttttgcatcctgtactcctttgagaatatagtggaacctctggcccattctacaagggaaaaataaatgtattcctagccaggcatttgtgtacaattttgtaggggaggaaaggattgttcatagacactgaattaagaaatccctacactttatgggaattgtaatcattagtagcagttacgtagacatacttccattaaatacacatacttgctttagagagtgtgtttattcataaaaattcattgaataggattaggaataaaaatatgcatagaaatatttgttactttttcattgtaatggttttttttggatagaaatttatcagtgtgtaattaataaagtagtattgatttcagaattatacggtgctaaacaatggaaatttcctaaataactggcaggtaatggaaaaaaaattcagttactgacagcctgtcatagttgaatctaagagctaggggcaaaatacatatattctatgtagtttccatttctagaccctggatttctaaattcttccttataaaattttaaatttctttttttttttttttaaagatggtgctccctaactgatttccttcattttattatctcataacagatttgattttcacaatgaaggtaattattaaaatgcttcctttggtagtcaataaatataattagtttaagaaaactagaaatatttgttattagaattaggtgaacatctaagagtcttatttatggaagcaacatggtcaatatttatggaattgagttgaggctttgcaacactttcaacagctttttaaaaagcaaaatagttactgcctctgtggaaatagaaattacccacctattatgtaatgaaaaactaatgttggtttacttaaaacaaaactgtgtagcagtgtgttatagccacaggaactcctcagccaaatgttaagttaatgcaatgaaaacatttgtaaaaacattatcaagctgcaaaagaactagaaatgctagatactccctagtagctgggtgttcaaaaacacttgtcattctcacagttatatttgtggtatcttagtggtcattcaccttggatgtgattcctcaagtatgccagaaaagcatcgtcttgtgcaagtgttgtatttaggaagaactttgtgtgaaatcatgattgtgggtgaataactttaaataaataaatcgttttccttgatatacaatattgtgctactttccacagaaagatggaatcaatgctcttgactgtaatggaggtttacagtttttctaatttcttatttaggctgatctgagcaaagatgttcaaatttccacttatttaaacaagatagagtttttgctatgttgaaggaatatttttagcttagtaatttacttagaaactgccttattcaatattcgatgttaaatttgaactaaaacacatagcatcatatgacatggagtcttacattcacattttgttggactggaaacagaatcaacatattagtcatcttaattcatttaagttggctttctccagaattctagaatccaaaaacaacacatttgtcagttttacacacaaaaggagaggcaggatgtagtttatagttaaacatccagctttgcaatgaaaagccaatgtagctatagcacactgaatgaaattctgggtgaaacaaactgtgtaataagattttgatgcatattgaatacttagaaaatttgttttatatttgttttaatgagattctctttatatctgctttcatagaaacttgtaaattgtctaaaattaaattttctgtggttgtcatccacatgggttctgaacttgctgttataattattcacattttcttgcagtgaaaatctacagatcaaggtcatcttcacgtctttagttcttgttttgcttcaggtcagtttagaaccgaatgttaaaaggatattgtctattcgaagggtcagattgtggcacgtggaccaaatccagccccccgaggcccacttttgtaaatcaggttttattggaacacgggtgctcatcgtttacatatcgcccatggctgctttcacatcataacagcagaattgagtagctgtgagaccctatggccagcaaagcccaagatatttactgcatttatttactgtatttatgtttattctcttgccctttacagaaaaagtttggcaacccctggtttattctgttaacatgtttcctatataaggattcctctaataagttttcagaattattaagaaaacaaagctcattcctctaaaagaattggtatgtttttttttttttttttttggtggtggttgtttaatgaggaggacattataaagtattatatttcgtttccttaccttggttgccaggaagctcagaactttaaacattaaaatgtttaagtaaccagctcacttcacgtttcggatcagctttctttttcttaacacggggatacattttcactttaaaaaaaaatcaactttttgaagcataatttacatgttgtaaaacccatacatttaaatcatacacatgaaggtcttgacaagtgtgtacacacacataaaccaccaccccagtcaagataatagaatattcacatctgtaagaaattttccacctgccccttggctcaggcaatttgtcagtcttactactgattattgcgttattttaaaaccctgggttgtatgcaattgtctattacaagctgttttaaatagttttcggtagtggctggggcactaatgattaatagttgaatagcacagctggagaagttaagattcatttattctatttagtcttcagtacaaatttttaggtttccatgggagaatctgagatacagctcacatggagagccttttagctaatgtagcaataattaataagctggatagcctgatagcctgatgttttattagggtggtgcaaacgtggtttttgccattactatatatatatatatatacacatatatatatatacacacatatatatatatatatatacacacacacacacatatatatatatatatatatatatttttttttttttttggagatggagttttactctgtcgcccaggctggagtacagtggcgcgatctgagctcactgcaacctctgcctcccaggttcaagcaattctcctgcctcagcctcccaatagctgggattacaggtgcacgctaccatgcccggctgatttttgtatttttagtagaggtggggttttgctgtattggccaggccagtctcaaactcctgacctcaagaaatccgcccaccttggcctaccaaagtgctgggattacaggcgtgagccaccgtgcctggcctgccgttacttttaatggcaaagataattcttttaataattaaaatttgaaataattcttttaataagaatttgctgcttgccaagagctctgcagttattttattcaattttcctaacagctcttaagagtacatcttattattcccctttcacagatgaggaaattgaggttcacagaagttaagtctattagtttgctagagctgctgtaacaaagcaccacaaattgggtagcttaaacaacaaaatttattgtctcatagttctgtaggccagaaggttgaagtcaaggtgttggcagggttggttccttctgaggactgggaggagatacctgttacaggcctctctccttggcttgtagatgagtgtattagggttctctagaggggcagaataggataggtgcattaatatttatgaaggggagtttattaaggagtattgactcccacaatcacaagctgagggacaaggaagccagtttgagtcctcaaacctcaaaaatagagaagccgatagtgtagccttcaggctgtggtcaaaggccccaagagcccctggcaaaccactggtgtaagtccaagagtccaaaagctgaagaacttggagtccgatgttccagggcaggaaggatccagcatgggagaaagataaaggccggaagactcagcaagtgtgttgttccatcttctcctgcctgcttttctcttggctcgctggcagctgattagatggtaccaacccaaattgagggtgggtctgtctctcttcatccgctgacttaaatgttaacctcctttggaaacacccgcacagacacacccaggaacagcaccttgcatccttcaatccaatcacattgacactcaatattaaccatctcagtaggcttcttcgtgttcacatagtctcctcaccgtgtgctgtgtccagatttccccttttcataaggacaccagtcctattggattagggctcccccattatgacctcatttatccttaattatgaccataaaggccccatctccagatgcagtcatgttgggggttagggcttcagtgtatgagtttgggatggcaggggagcagttcagctcgtgagaatcgtaagattcctgatctgtttctcttccaagaaattgtttggtttcatgttgattttatctccttttccctatctgtctcaaagcactgaagaaaatcaagtcccccttgccctgataaggactttaaaatggtgtttgctaaaatggtgtgtgcttaggggcagctttgagccagataacaattctagttgcgcatgcttccataagctgtttactctaggaaggagaatctctgttgggatcttttggggagtacttgcctcccaagtgcttaggctcccgctgctgacaagaccctctgcctggcaagccgtgcaggttggaatcctctgttagggttccaaagccttcaccaactcagagctctttctctctctgtttctcttttttgaatttaaattgatcctagtcacaatgttcacattacctatgttggggatcctaccaagaccctctttttggcccagaagcagcagcggggtgaggggaatgaaacaaaaatttatagctgtcgagtctccagaagtcatgtaaaatcagcctcagctggaagctcctccgtgcatccctcacattcacacaagcaggtgcctgatcacagctgatggttagattacacgtttcctgagaggtatagatttcaaaattggtgtatttcacccgtccctcatcatggtatccccaaacaaaatgttatcaaatgaagaactccttcccagctctcccttctgagtgtctgattttattcaagctcagatggcttctcagatagcgtaaaaagtgatggagaatttcttttaccaattgtatgccctgtgggaacctgggtgctgtaatcactgaatatgttataaccaaaaaggtcaaactcgcaatgattcggtgtgttttgttccgtgcatcctggcatgtgaaagaagtgaggtaaagagtataatttacttccttgttttaaagctagcattgcccgtgccttccacgcgggactgttgtggatatttgaccactgcaagaaaactcacagaagcagaaacttagggcttgctttaaatgttatcagtgtgaattgagatggtgtcagcattatttttttaaagaccaaaacaacaatagtaacaaacacacacaagccactgttagattttacaaaactttaaaaagtaattatcttaaagatatctaagatagtgatctggttacatagattatcagagatacttttttttttgattatcagagatacttttaaaaaagcaactacaaggtaaggattatcctttaatttagtgtttttctattaaactcaatttgctttaaagttttttacattttgcctcttttttgtatgtttgagtaccacttcctaaccaatcacaataaatgtccggtttggagttggaggagtcattgattttaggcaaggtgatggtgagcccacagagcacagagttaatggaactctggccgttgatgtagcttcgaagcctgaatttaagtcatatttttgaaaagttgcgtcttaaaaagttactagcgatggagaatgaaaagtcaatttggacactttaaaagtgagcctcaaaaaactgctgaattttcccaacattgtgttttgagcacttccacgtgactttggtagcataaagactttagtcttttcaagaggcaaagtaatataccacttttcgcttttttaatggtgagagccaaggtcaatctgaatttttctttttctttcttcctttttttttttttttttttttaaaaaaaaaaaaggtgcttgaattagaaaggtagcacattgtccacatggacagtgcaggatggggctggctttttcatttctgagagctggcaatggaatgaaggtctttttttttttttcttaatttttcttttttaaacaattccctcctaagcatttcttaattgacaggggtggaaactatgttgccaagagggatcacagcccttttggtcattaagaaagtcaaggaacggggtctctttggatgagtgtgtgcgtgtagaatcctggtggctggcctgcttgctctaaatcataaagaaccctgtctcgagcagacgagaaagagtaacggaggcctcaatggtgaaaggaaatcctgtaccagctgtgaaaacaatgagacacgttcagtaatagaatatagtgtgcttacaaattcagagttgggttcccttcttctcttgaagtggctataaattaattcatcaaaataaaaaaggccaaacttcaggataaatctttctacttctaaacaaccagaaacactttggttgtcttagtagataggagtgtgagtacagaattatacgaagtgagaccatgggtgtgtgtgtgcacgtgtgtgcgcatgcctgtgtgtgtcattggttagttaacaaaaggattgccctctgaagaacatgaacttgggccagacagcacgtgtagggggtggaattatggagcaattgttactttcttgtattaagaagaaagggagcaaaagagctgtgtcttcttgagaacctttaaaagacacagaggtctctgcctctaaaaagctccattacatttttttttttaacaggaggcctaaattttttatgttttattttgtgctgttttatttttcttcctaaggttctcagacaagtttataaaagtgccatgttggctgggcagagtggctcacgcctgtaatcccagcactttgggagaccagggtgggtagatcacgaggtcaggagatcgagaccatcctggctaacacggtgaaaccccgtctctactaaaaataacacaaaattagctgggcatggtggcgggcgcctgtagtcccagctactcgggaggctgaggcaggagaatggcgtgaacctgggaggcggagcttgcagtgagccgagattgcgccactgcactccagcctgggcgacagagcaagactccgtctcaaaaaaaaaaaaaaaaaaaaaaaaaaaagtgccatgtatattttgattacaaaaaatttcatgcggtgttactttctttttattggtagagggtctttatgttttatttttttgagacagaatctgctccatcactcaggctggagggcagtggcaggatcgtagctcactgtaacctcgaattcctaagctcaagtgatcctcctgccttggcctcctaaagtgctgggattatactttgagccactgtgcctggctggcctttgtgttggacgttaatacagttggttctttaaagtttgacagtgaagacttttggaaattaaagaaaaaaaattgagtataacttgtaacggtcatggtgtaaagatcattttttactggttggaagtatagaagtggggttaaattaagtctataattgtaaactattgatgttggaagaacatagagagaaacttattcctgtggactggtgatcccatctcacagcccttacagataaatgtttgtaaaagcaaaggacagtgttaattctgagccccaagatgaaatatcaagtaaaagagaagaacatttgccaatgcatcactgtctgggaatggattccatacagcaggtaggtttatgtaatacagtagctgaagagacctcaattctgtgccttgatgggattacaccgaagggagcactggtaggctgttgatgaaacaggtggtatttggaccacttctccctctttccggacagctgcttagtaggtttagcttaaattatacacatgccaagcatgtacacatatgagaagcctatatctcgtaatatccacagagaatagatggcaaatcccatgatttgtatttgactgacagtcaagaccctgtggggtgtgagcctggtgggggcattccaggctggtttctcctgcctccaggagctgcttctagtgtgtgctcttaaccctaaaggaaggaaacactgtgtcttcctcttctctcatacagagcccttcccatgacaaatgtgtggagtgttccctccttttacgtaattctccaattttctggaccccagcttggtgtcctacaattcagttttgacactaacgacccagagtcagcacagaccccatggttgagggctcagtcctacaggatcatcccctacttcaaatgccagtagcaagttcaagattgtcaagtgcacttctgactcactggctacaaattggggttcccacgaccatctcctcaggcttgataatttgctataatggctcataaaactcagggaaatatttacttatgtttacctgtttatgataaaggatattacaaagagtacagatgaagcggtacatagggccaggcatgcggaggggatgtggagcttccataccccctcccggcatgcccctctccaggcaccacatgctcagcaatctggaagctctccaaaccctatcgtttaggtttttgttgttgttgttttgagatagggtctcgctctgttgcccaggctgcagtgcagtggtgcaattatgcaatcatggctcattacagccaggacctcccaggctaaagccatcctcctgcctcagcttcctgagtagctgggactacagttgcacaccaccatgcctggctaagtttttttgttttgtttattagagacgaggtctcaatatgtcacccaggctggtcttgaactcctcagctcaagcaatcctcctgcctcggcctcccaaagtgctgagattacaggtgtgagccactgtgcctctccatttaggattcttagagaggttttgttaccctaggcatgattacttaaatcattggccattggtgattaagtcaatctccagcccctcctcttcccccaaggcggggaatgtgggggttatcaattattcacaactctctaattgtgaataataaaagactctcccctcacccacattgctcagaaaatttcaaaggtttttgtttttttagacagggtctcgctctgtcacccacccaggctggagtgtagtggtgcagtcatagctcactgcagcctccaacttctgggctcaagtgatcctcccacctcagcctcttgagtaactgggactgcaggtgcatggcactgtgctccacaattttttttttttttttagagatgggatctcactgtgttgtccaggctggtctcaaacccttgggtttaagtgatcctcttgcctcagcttcccaatgtgctaggattacaggcatgagaccccatgcctggccaatttcaaggattttaggagctctgtgccaggaacctggatgaagacccagtatgtatttcttattatatcacaatatcacaaatccacagtcacatggtgattgtggtagtgtggggggcctgatggtggggtacacctgcttgaagtcaggctaccatgcccattggggtcctcccccttttttgccctctgatcttgtgagttccttaacattggggatcagtggtttttctcttacatgaaatgacaatgacactttatagggtttctgtagagaataccttagaattagttaatgtgtttcataaagcacatggcgtggtacccagccaagagtaacactctgaagtgctcctccttacctggacattacagcatcctttgtataaatcaggatgctcaggaaataccttgtttggaataggaataggctcctccctttttttctcacttgccttgattgctctgtattaaaattcataaaggcccatgaattatcaattagatagcatttggtttgttatttttagtttcttcctatagcaggcatgtatgcatgtgttaaaaatggaagtagcgtcgacattatgaaatgcacaagaagttttcctgcccccaaccggtaactctctcctgcagtaatcaatgttggcacctgtttaaccacttttgtgtcttacgtgcacgctgttcggtactttgactttttttcttaatattataacatggaggccaggcgcggtggctcacgcctgtaatcccagcactttgggaggccgaggcgggcagatcacgaggtcaggagatggagaccgtcctggctaacacggtgaaaccccgtctctactaaaaatacaaaaaattagccgggtgtggtggcgggcgcctgtagtcccagctactcgggaggctgaggcaggagagtggcgtgaacccgggaggcggagcttgaagtgagccgagatcgcgccactgcactccagcctgggcgacagagcgagactccgtctcaagagaaaaaaaaaaaaaattataacatggaaatgtttccttgcatctccgtatcatttctcctcattctttttaggtgtaacacagtattttgtcctattcatgcaatataatttatataacctaattgataaaacattttggttgattgcagtctgtcgtagataatgccgtactgaatattcctcccacatatttgcaagtctatttgtaggataaatttctggttgtggctgggtcaaagagcatgtccacttcaaatttgatagctatgtcccaactgcccccaaatatgttaagccatttcctatcccccatccctcattaatctatgaagttgcctggttgccccacatctttaccgacaggactgccgctcaatgtagttacccttgtagaatctgtctgcatgtgcctgtctaggaccatgttaattgtaatctttgggcatttttctcactcattcctaaccaggactgtcactggcaggttaaatgagaacttattcacccagcacagtggcagcactagtagccagcctggggtcagtcttgcctctcgagagatctcatgcagtcaactgggatttattgtacagctttacaaaacattacggcctcagccttgtactgcccaaagcatgcagatgccgcctggtgtattttaaagatattccacatgaactgacccgtttcccacttcttgagttggtatgttttttgattaatatatttgagatgtatttatgttattagggctatttaggaagctctgtagggatttgttgcttgctgtatataacacatacttttaaaaagcagggctggctatgacttatttttctctagagagacctgtgtagttttgtaagttcttaagatttggcagctgtggatcgtgtttagtaagcacgatctctaactctttggaactcagaactatgtaattgaaatggcctgggaggcaaatgtgatcattcaggtaatcaaagtaactacagaaacagaggtatggattagctagtcattgcagatgtggcattgagcatataggcgtggtgtacttcttagaacttcatctggaaatgcctgtgggggagttggatttcaagatcatcgtcaatgtcatgtcactgtaatttcatttacattaatcagattagtttggaaagtatggtcttcctacttttaggaggatataggagaaactcatccttaaagatagtagtctgttaatacaaaaacagtccccacatttgcattgtccccaaatctaacccaagctgaaagacattaggcctatcttcttgctttatgcataatggcagatctccagggagggagaggatgtgtgctggaagattctacaacttgttgattggttcctaaagatcgttttagtgctatgtttgtggggcggggctggagggggctggaaatcaccatctctgtggccttttaattgtgcccagttacaagtaacatttgtccccagtgtttcacaattataaattaataataaccacccattagaaattacgggtattgtaagccccaactcctttgggcgtcttaataaaaatgataattaaaaccataatttacagtaaatggggacactgcccaagtacatccacaatatggagaaaattaaaaaacttaaaccagaaggaaccttcctggcatcggggaaagaagctgcctttttcttagctcctacctctgtgggagctttgtcagtatttgaggggacagggttcccaccttcatgttttttgtgcctgaggattctgtgggcgactgtccccacctgtccaacctaccagtgagtctcatggtgtgcggctgcctgctccgatgctctccaccaccatgcccaagccatttctccctttgtgttccctgtctgggtaaacaacttgccaagctcaccagtggcccacagggcaccttggacacctagacttaggcagtccctggctttgtagattttttttgcttcctacatgattttctaatttataccttgagctgctcgggataagagggcacctcgtccatttctggctggtcacaaggccacagtatcttgagcgagtccattgtgaccactggaggtactgtaaatggataaaataataatatgaataataactcatagtgtttactccctgcctaaatccacaggctcccgctgcctacagaggagtcccacagttttcgcttgcttcatggagcttcatctctgttgtattcatgtgatttatttacacagagttgctccccaatccttgatctttttttttttttttttttttttttgccaagcaccctgcctttttgcttgtctgtttcgtctttatctctccttccagtaaagttcttggcccagaggttctgctgccactcagtgacatttgtgaaatgcaagggagcttgcaccatgggttcaagctcctgcagatccctgagcctgctacccttgtgcttctctgtccacgcaaagccaagtgctactgcggggttttccaaggcatagctagcatcctaatagtctcacacttgacatagtagggtttgacatggtttaaataaaatctcaaccagatcagtgggagatgttctttgagattcggtgattgagttgtgaacgtatggactgagggtgttttgtggtaaggcttgagtcatgtctgtagcaaggatgtttcctgaataatgtgcactgagcatcaagtgcctgcagtggcctggcgggtaatgccagcagcacgggtgatgatcatggtcaacatgaccaactagaaagcccaaaccccacctctagctgacagtggcttctcagctaacctgtcaccacgtgggattgggcccccagtggtgtaagctttttcagagaagctacacatctagcttttggacctgtgatctccccaatgttttaatgctggcaactaattcaaattaggaaggaaggaaggaagagaggttggaagggagagagagaaagaaggagcaaaggagaaaagaaaggagagaaggaggaagggagggaggaaggaaggaaagaaaaggaaggaagggaaagggaaggaaggaagggaagggaagaaagtatgggccacacaaaacaggtctgtgggcttgacttgtcctctgatcatcagtttgtgacctctgttctaaagagtgaaaactatgtaagatagtataagataagtaggtatttaaattactttgcaccttttccatttcatagaacttgaatgtttgtgttcaaagcttaaaacccaagacagtgagctattaagcctccatggccacgtcatttttctgattgcatctgatgtaacaagtgctagaaaaactgatgctgttcattgctttaaaacgtctttctttattttcttggtattattaggtttacatattcttccgaacacactcttgccatctccatgcagttaagctagttcaatttaaacattgtcataaagttaattttttataagatgaatcaggttattaaatttagtaaaccattgccttcattattttgcacaaactttggcactgtgcagaataggcttagcactactacatttagctaattaaactggccgtcagctgcagtattacaagagtgagggatgttattctcttgggttttatccaggactttaacagtaggtagcattattaagctttttttatataaaactccacactctagagatatggtttactataaaagtgttattgtccttcctgttaaactatcatcttttgaaatagccacgctttgtttctgttccaaaggcaattgtaaagggtaagaaaatggagttgtctattgcagcttttaaaagtagactagcaacgggtaatgcattgcttagataaaggaagatgtaagaaccagagtgtaatttcacaagacacagagacagatggcttacccgtaactacagtcaggaattctctaaaggagagagggtggaagcttgagcctgtagcctgttgctgctgtcttgtcagatgtgccctttctggtaataaaaagtcctttgccgtgggttattttgtcaagtgagatagcaggacttaacaggtttgtttgggaaaataaaatttgatagaaaaacggcgtgcttttcccccacagatttcttggtagcatcattcaaaactacagtgagcagtatctttgcaggattttaatatttattcattattataaaggaaggaagagggccatcgtgttgcagtttgaaacagcctggattgttttaaaatagtccagagctgcagcctattagcagtctgcaagaaccatttgtttcttcagcagatatttattgaatcctactgggtgctagtctggcgaaatacggagattggagggtgtaaggctcaaggagcttacctgagaaactggataaataaagctctgtactgggtgtggtggctcacgcctgtaatcccagcactttgggaggtcgaggtgggtgggtcatttgaggttaggagttcgagagcagcctggccaacatggtgaaatcccgtctctactaaaaatacaaaaattagctgggtgtggtggcacgcgcctgtaatcccagttgctggggagactgagacacgagaatcgcttgaatccctgcggtggaggttctagtgagcagaggttgcagattgcaccgctgcactccagcccgggtgacagagtgagactctgtctcagtcagtcaatcagtcaatcaatcaagttctggaacctgcctggccttgtgttatatcgatgctttctcaatctgttaaaaacgtagctgctattgaatgactaagaattgtttactctcatttccactctcttacatcttttttttttcttttaataccctgtgatgaaactgtgaagaaagatattcctgatcattgctttgacctggaaatttcaaagggacccacagtccaccattccgtccaagatcttctgggtgtgtgaagtcccgggctcccaaatgcagttgtgtttggtcactgtgttgcttgcatatggctgttggcatctcattagcctgattgatggggcagatcagtcagcaagactttgttcggtgcctgcccccagccagctgggctacaaaacctggcattttacttctctcattttccccaaatgatctaggtgtcttttgctcactggtgataaggggtgacattggtatcacaggtaaaaatgagtaaatttgagattattgtcgtcttgctttaaaggttggagatacagcttcaaaaaccttttactacccacacacccaaggggagtcaaatggatttaggtgttaaatacttcaggtttgaaatcctttgtgcattatttcagcatctgatttaagtatcagaggtcatctttaggtaataagtaagtattttggaatatgggatttggcaaaatctcaagaaataatttcaggttgtctcagcaatgaggttaaattgtgctccagagtccatattcagacaaacggaatggtggagcccgaggttgatttctttgaattctggttggtattaaagtcattcagccctcgggttaccattggtagcacatctaggagcaagttttaattttttagtcatagtgactgtgctggatttggtaggtcgtacgaattgggtaagaggcataggacaccaaggattttgcaaaaagcaggcaactaacatttgttttccacctactatgattatgttaggctctcaatatatgtttaccacttattccccattttacagaaacgataactgagtttcacatgggttcaaggcgtgaccttagatcccacagcttgtacgtgcttagaactggcagcaacacaagtgtgtccaacttgagttttcctctgtgctatgctgattttccttgagaagtattctgtataaatagactgttttctatgaagattaggcctgtgggagtgatatgaatgaatgaactttactaggctctttcacatggtgatgtcaggaagataacggtatgctgattttgcgtgcatattaacattatcttgtaaacaataatttatggccatttgacatgggtttggctgaattgcatagctgccttctctagtagaattgactactttgttattgtactgtactctatagggtcttccaccacagattacaaaatatggtattttttagtttagagcaatgggttggtgttcaagctctggattagactgcctcttctttttcctccctccctcccctcccctcctctcctttccccttttttgagatgactttaaaatatagattcatattttttaaatatacagaactttttcagttttccatttcttcttgtggcaactttttttgtagtgtttttctaggaatttgtcttttttacctgtattgtaaattcattggtataaagttgttcaccatatcttaagatcttctttgggttcataggatctgtagtccttttctttatttttcatttttaaaaacaactttattgaggtatgattgatgtacaaaaagccttacgtatttgatgtatagaacttgataagtttggagataagtatatacctgtgaaaccattatattttataagtacatgatacaatatgagcacagtactatatggtagatctctagggcttttccatctggcgtacctgaaacttcataccctttggctaatacctccttgtttctctctcccctcagccctttgcctacaccattctattttttgcctctatgagtttgagtgtcttagattcctcatataaattgtatcatgtagtatttgtccttctgtgtctggcttatttcacttagcataatgtccttcaggttcatccatgttgttgcaaatagcagaatttccttcattcctaaggctgaataatattccattgtgtgtgtttgtgtgtgtgtgtgtttgtgtgtgtgtcttccacatttcctttatccattcattcatcagtagaaatttaggctgcttccatgtcttggctagtatgaataatgctgcagtgaacatgagagggcagacatattgttgtgatcctgatttgagttcctttggatatgtatccagaagtaggattgctggatcataatccagcaatttttaattcttgtttcgttttttgaggaacctccatactgtttttcataatggttgcaccaatttacattccactaaggaatgtaagtttctcacgcataagggggctcttgtttccacaccctgaaccacacttgttatctttcattttatgatgagaaccaccttaagaggtgtgaggtgacatctcactgtggtttcaatttgcattttcctgagaattagtgacagtgagccccttttcatacacttggctatttgtatgttttctttggagaattgtctatttggttcctttgcttgtttttaaaatctgtggtttttttttttttttttttttttgctattgggttttaggagttccttatatattttggatatgaacactatcagttatgaggtttgcaagtattttttactattttgtagcttgccctttcagtgtcttgattgttttctttaacgtgcagaagctttttagttttacgtaacctcacttgtctagttttgcttttgttgcttatgcttttatgtggcataatgttgtccttttattcatccctgatattggttgttcaagccctctctttctgtctctgtctctctctctgtcattcttgctagccctttatcaattttattagttttttcaattgacagacttttagcttctttttttctctgtattttatgtttgttttagatttataagtttctcctttctccttttatttccatcgttctgctttctttaggcttaatttgctgggttattttcctaatgtaatggatgcttagatcatcttggatgcttagatcatcattttttctttctttctttttttttggagcaagatctcactctgtcacccaggctggagtgaagtggcatgatcatcctcctgagtagctgggaccacaggtgtgcaccaccacgcccaactaattttttgtagagatggaattttgccatgttgcccaggctggtctcgaactcttgggctcaagcgatccacccgcctcggccaccccgattcctgggattacagccatgagccactgtgcctggtcttctttttaatatatgtagttaaggctatagattttcttttaaccatggctttagctatactccttaagtttgtatatgtgtttgtaattaccgagtttaaaatatttctaactttcattgtaattttttgagccataatgtcttatttatttatacatatatttccagaaatgagaattttctgggatcttgttattgatttgtaatttaattccattgcggtcaaagagcatactttctaattttaatcttttgaaattcattgagacttgcttttgcccctgcaaatcatcagttttggtaagtattcttgaagtacttgagtatattttgctgttgctttcagtgtttatcatattcaattattttcagtttatcaattaagttgttcaagtcttctatatactttgtgtttgtctgcttattttatctgttactaagagggatatgttaaaatcttccattataattgtgaatttgtctatttattgtcctaattctgtcaatttttgacatatatgagaggctctattattaagtacatataaatttagaattgtcatgtattcttggtggattgaaatttaccattgtgaaatattcagcactttctcttgtaatgcttcttgctttagagtcttttttttctgaaattagtacagctatatcagatttcttttggcccgtgttatacagtataccttttctattcttttactttttttatgcttatgtttaaataaggtataaaacataatgtacattcttttttaaggacagtatatgtatatttatgttttcttcagtctgacaaactttttcttttaattgccatctttaggccatttatatttaatgtaatgacagatatatttgagtttgggtttaaatataccaccttattattggcttcctgttaagttattctatattcctctttcccttatttctatcctttctttctcttttttcttttcctttttcctttctctctctctctctctttctttctctttcctttctttcttccatttaaattgagacagggccttgctctgtcactctggctggagtgcagtggcataatcatagctgactgtgcccttgaactcttggactcaggcaatccctcgacatcagccttctgagtagctgggactaccggtacctgccaccacacctggctatttcttttttaattttaatttttgtagagacagagttttgctatgttgcccaagctggtcacaagtgatcctcatgctttggccgcccacggtgctagaattacaggccactgtacctagtcatcttctctcctttcttgcctttttatcattctgcttttcttctccattagctttttaaatttgtagagatttacatcttgcatctttgacttattaaaatctaatataaatcagtattatatcacttcctggagaagacaagaaccttaggatactttgcttccattactcacctcctaggttaagcattgttattattattgatatagtaatttttgctatatattttaaaactcacagatttcactcttaccatttggatcttaacatgtcgttaccctttatgttgctctttgttactttctgcatctctgggtttatagctaaggtcattttcctcctgcctgaagagcatcctttagtgtttcctctagtgtgggtctatacgtgacactaggtgtagtgtaggtgacaaacaaaaagcagctttcgtttgcttaaaatttttgttctctgcctttatttttcaaaaatattttcactaggtatagaattctaagatgaaagttttattttttttcagctgtggcttccatcattttcctgagaggtataactatcagtcttgtagctactggtctctaactacttctaaaactatctgcagtttttagcagttttactctgatgtgccttgctttgacatgtatgtgtatatatgtgtatctacacacacatacacacatacagatacacactcacatatatatttctgtttgcggctcacacagacataaatatatatatatatacaaacgtacatttctgcttgtagcttgcacatatatatatacacacacacacatacatgtagacacacacatttatacatatacatgtcaacacatacacatacatatttctgcttatggctcaggatacttctttttttggccgtgtatgcgtcattgattttgtaacattatcagccattctgtctttaaatattgcttttcttagtctatttcacttgttttggaactcagattacatgtatgtgtaagagcctgggagaatgtgtttcatatgtctcttttgtgctttgttttattgtgttatttttttctttttatgcttcactttggatttttttgttaacttattttgtagtttcctcaatcttgtcgtcagctgtgtcttgtattctgttaaactatatgctgaattcttctttactcttattactcttattttgtttaagtttcagaatatctatttgaatttttttattgtttctaattccctggcaaaattctccatcttgcctttttgttccttgaatttgtcagtcagacttattttaatcactgtttctgaataacttgattagacagatctcctgtgcatttatttccatttgttcccctctggcttttggtgaagttttttctttttgtatgcttagctattttgtttgaatgtctgagagtttatatgagtatttgaaataatcatagtggtaatttgagactctagataatggtatcttcctccagagaacattttctcttgcttctggaaattggatagatagggactgatcactttaatcaaactaggaattgaaatggcctgaagctgagtttccactcttgtgaaggctggactgtctcttgttattacagcgagggtataactctttaggatcccgacccaaggtttggtgtgtttaccgtggccctttcctggtgggtcctgagctcaaatttatgtctttttccttgttataaaattgccaaaagctcagcccatcttctcaggcttccaaccactatgtttggaaatgaaatatgccttgaaggaaaaaagctgccaaatgctggccttgcagtttttgcagatcttggcccccaaaattcttagtcatagtgcccttctgatgccttcaaacagatatgggtgtgtatgcacgtgtgttattttgtccatcttttctaattgttctcagtaggaaatggggctaagaaacctaggtaacactggtagaagcagaggtgctggcgacacttaccatagagtagagcataaagtccttatcgtgggcacaggatctggtcattattgatggttaaatggctggacatgccgtgaactcttctatgtcccagtcttcatctttgaaatcactgcatccctaggacaagttttctcaccatcacagtgttgacagtccgggccagatggttctatgttgtcaggggctgccctgttcatggtaagatgttttgtaatgcctggtgtttacccactagatgccagtaggactctaccccacaactgtggccactgaaaatgtctccagacatttgcttctgtcccctggggatcaaaatcacccctggttgagaacttggggtaatttaagtggtgctccggtaaaggccattcaacatgactcactgtgttgatgttatgttttctaacattgactttcctttaaaccatagggttcgaaaccgccaagtcttttgccctccatggtgcacatgtgatcttggcctgcaggaacatggcaagggcgagtgaagcagtgtcacgcattttagaagaatgggtaagtgcttgactgttgttgttttttttaattgtcaaatacacatgccgggctaaccatatggagatttcagtggagtgtgtaaagtttattgctcttggaatcatgtctttatttttaaagtcatcttcactttgtttgtcttatgaatgaaagcatgagcaagtccattattattcacgcatttgtttgtagttcattgtcagtgtcatctgctttattagtcaggggtttgagaatgtttcttcctttaactcatttattaagaaaaataaaacgtggtgaacgcccatgattgcaactaggagactgttatgcttatggttgttaagattagaaagaaggaggctttaaccctatctctaatttcttacttttctctgtctatgtagaagttgatgttgatacgtgtctacataaatatttactaagggcttgccttagtcttgggaccaaggatatagtattaaacgaaacagaatccctgccctcataggcttaccttctaggtaggaaaaatagaccataatcaagtttaatatttgccataatgtcagtaaataaaggactgtaaagcagaggaaggtggggggaatgatagcgtgagtgtgatggagtcatcagcagggagccttccaaagttgtgacatttgatctgagacctgaatgaagtaggggtaagccatgcagatgtcaagagaagtattctcttagcagtgagaagagcatatgctaaggctcagaggtaggcacaagcctggagatttcaaggatcatcagggaagctagtgtggctggagatgaatggagtgggtaggagaggtgctgttgggggatgggtatctggtagactctgagatagcggtgaggaagacattagagggtttgagctagagagtgatgcgagctgtttgatttttgaaacatcgctggatttcagaatgaagtccagactgcattcattcacttttcattcattcacatattcatgaagtgcacctctgtgatgggtgctggggtctactgttaaggacaacagacgttgccactgtctttgtagagctttcagcctattgtggaagacaaatttagtcaaaaaacacagatcttaatgtaaacttgaaaaagcagtgagtggtcctaggaatcagtaatgatgccagggagttgggagacctttggggtccccaaggaagaagtgattgaactaagatctgaagaaagacctgaagagggtggagaagggtcagatggggtaggggaatggcaggtgcagaggccctgggaggagggggaggaggagatagagcagcgtgtttgggagcagagcctgaagggggctgggtacaccctgtggaggccgtcttcatttttgaatgctgtgaaagatttcttgccatttgaagaaatagactacagtgtacttaagaaaatttttggtactctggactgaaaagtagtgaaaataaagaaaaggaagatttatttctgctttttcagtgtatttatgatgaaatatttgaaattcagtatatttgaaatgagcccttatcttgagctcactgagcttattattttgggttaaataaaaaagaaaacagagtcttactttttctgatcattttattgtctttctgactaatgttaaaaagtagtaacctctagtaggtgggatagtagcaatttttagggatgtattgagaagagtacaaatgggaatacgtgcatcttatttgaatctacacgcagaatgggaaggtgaaaaatgaaatgtgaaagtcgttcttggtccttctcttggaagataaacattatgtattcttccagaaaaaggttatctatataccagcaaacacactcacattctgttctgtactttttttttttttaaacttagtactgcaggagatctcttattagtgcatatagatctacttcattgttttaactgctgtataatattccatcatgtgcttatgctataaccagtcttccctttggtggccatttaggttgtttgcattgttttgctatttgttattccaagcaatggtgtttcacagttctctctttcttgcatcagtctttcttacgatatcatctgatattgggcctaaactatgctgctgtgagcattctttatttacgtatttgtgagtaaatgcctggggcagaatcttagcactggactccttgattcaaagggcatatgcatttaaaattttggtaacagttcccgagtcattttcttttttcttttttttctttttcttttttattttttttttgagactgagtttcactctgtcaccaggctggagtgcagtggcacaatctcgactcactgcaactttcacctcctgcgttcaagcaattcttctgcctcagcctcccgagtagccgggactacaggcacgcgtcaccatgcccagctaatttttgtatttttaatacagacggagtttcaccatgttggccgggatagtctcgacctcctgatctcatgatctacacacctaggcctcccaaagtgctgggattacaggcatgagccaccgtgcccgacctcccgagtcatttcttatcttgttgctccaatttccattcccactgacagtgtagacagacaactgctgagggcttgcagtgttcttgggactagcaggagggcgtgtcaaaattgtaaaactctgcctatttgatgtaatatttgaaactagaaaggtaaaattccagggacgctagtgacactatggtaacctgattgtacagtgacattcatgtttaaaccagtcttggaagataatgctgtagcacaactgtttttgcatcattaaatttatcctcttcttttctgagaacacaatatatatgagaacacattcatctgcatttatcctattttaattattgtttgatgcttagagcagaaattcctggacctgccccaattagcgatgagaccttgggtaagcctctggatctatttggagcctgtttcctcatctttaaggaaaaaggttggatggatgatgtcaaagacccactgttcagtctttctttcttatattttgagccttaattgggtccctgtgagtcaatttccgatgatagaatttgctgttttatagttttactctaacatgtagtaccttgagatagaccagtgatcccagactaagaattattcagaatcattcaccgtcggggacacagaaaaaggaaaatggaacagaaacaaaactaatacacgtggctccagatgtttaaaattagatttgataggttgtaggctgaagaaactcaacctgttcatcatctctcatcttttcacttgttctctctgtatgccattatattgtgttcctcattttcccaagatgatgattatggaaactcaaattttgcaccagaagctgtagttaccatttcattccattgcaccattcataccctgcagagaggatgtgaagtcgtaaggccttcttgctctggtgacatctgttaggcttcgtctctatatcatcccccaactccttgacccttgatatttgctggtctacttcccttcaggtccttcctcacctcacatctctgcgcaaggatttcatctggtatgtcactaaatattaccttcctgtgtttctcaaggtcaatttgatagactccaatttttcaagctgctggccagcttgagcgtattcatatgttacctacgatgaatcacatcagtgtcggggccgggaaggtactgcaacatattggcgcctcacgggaggctctcaaaatgatccaaagttttttgttgcagcaaaagctcattcagaagtctttgggccatttggctcagcggaggctgtcatgtgccaaggctccgtgggcattcttagctctgcttctggagataagagttcattcctccatcccaacttgttcttccctgcccattcttcctcttcctgccttcactgcacattccgggatcgccatgttctagaacattcatgtctgccttttagccagcagaatgctattctcacatccacaatgggacagctaacagcccccatttatcaaatccctgtcatatgctgtgtcaggcactttatatccctcatccaggaggatgcaaaaacctggtgtttttcttttttttttttttgcattttccagacgagccaagggatggctcagaagggtgaaggaactcacccgaattgcacagctggtgagctcagagtcaggctccttgcttggtccatctggcttccaaactccaagtctgtctgctccaccccatggcccatctttttaccatgtttagtatcaatgttcatactttgcagattttgctttcaaactctctagctgcggtttgagtgattaatttcaggatccatcctatttcttagaggaagccactctgatctaccctgtcgtctctttatattcaagatatcctttatagagctctcaaattacttttgggaagaaggagctatttaataaaatacaacttaagtgaaaacacattccatatagaagtatattaagaacctatatgtaattactatgactactaattatttcatgggaaaatgccctcctgctgagatgttttagatgctccaaagttagaagagaaaaaatgaaaacaattaaaacaggataacatggacagtacagaagtaaaccactgtcttaaaaggccaatccatttggcataattaaaaaaagagggaggagatggaggcacatcagcccccattcatatttaaataaagaaaacggggcagtggggcttgttcctatgttgtggaacagcacacagatgtgatctacctcattcacatccttatgtgaattatacactggtgccctcacctcttaagacaagcacctatcgttttcctgtgtattccaagaggccagtgtggctggtggaataagatgttttcctgttttcaagatgcagtggactctcttttatttaacagcagtgtctatgtgttaggaatccatgtgagttctctaagtctgggacaacgataggtgtgtctgagtcctgcattaccatggtttattctttcctttacccagtatctattggagttgggcttctgttgctttatttctcggggtctggcatatcccactccctgtcttgagatctcaggacctctgagatctcaggacctctgcatgtaaagaacaagagcttattaggtatcaaaacatacttcatgaacagctacagcaagacctcgacattccagtgtagagctcttgaaagaccccagtggggctctgagttcctccttcttctgtttctattagatttctaaattttagtttctaaattttagatccccggaacttgggatctaaaactctggtcctgtggaagaaggaggtagggtagagtgggagcagatggacctgatgtcatccatctccctacgttgtttgcaggaggaaaagggatgaggctgaggctgggaggcaggggcggtggattgagagagaggagagggattgttatgagtaaccaatgttcctcatgcctgccaggccctcactagatctgtttaacagagagtgcagaagagcttctgttggggactggccattagtatagcgaggggcccaataagtgttgtgaaacatcagcatctgctggacattgagatggccacaggttggtcagagagggctggtatgggaagaggggcaggtggctctcccttagagttactatttgactcacccctgacttcccagaatgtgtcttgagtctattaccctctcatatgggaggggtgacccaagtatgtttgtggcaaccaaaatgtctccaggcattgccagatgtctcttgggggtgcaaatcgtccccagttcataaccacggctataaaacatgctgtattatagtggcaaagattagaatcagatacatcttatgaccttgggcaagtttcttaacttctttaaacctcagtttcttcatctgtaaaatgcacatcataatatctctattcagagatacaggtggttctattaaacacatcaactctgtgtatataaagtcttaacccattgtggaataaattaagtgctcaattaaatgttagctgctgctattaataacaacaataataatattttcttcacgcatgaaagtgcaaagtgatgcttacttttcttaacctctccaactggctgaaagaggagctctagggcagatgtttatcagcctgatttcagtggagttgcaatgaattctttttctgtcttcatatgtctggactcctacattttaatggatgtgtatttagtttgttgattagtattttccagtgtagctcatattagcactcaactgtcatttgaaaagccatcttaactatttatgtgattgctttttcttttgtatttacaaagaaatacactctgcatatattttggaaagatgattaagggattagtcatcaggaacagcaagcaatggtttatatcaaaatgattattgagaaagcagagagatgaggggtaaaaataaaagatttattagccagaggtaatggaatgtgcatgttttagggagagagcgcatgctcagttgattgcaaccacacggtttgctgctgaagtgctgtaatgattcaggttttcaatagagttgatatcgggtctatttattttgtgggagtgaagggatagggatagtactgacagcattatgtgattgcagcctcattgattagcatcggaaataatgactttaacattattttcagatagggagcactcagtaccaaccattatattaggctcatgggctcaacattttgctgtgcttttcatagatactgacacctgtgttttcattttgttgttgttgttgttttccctgccgggaaactgccgcatcctgtgttttcatggcatgatattaaggaacgatgggtaggatgctgaggagtaaattgctcgcacttttaaagacttctgcaaaactccacctacttttaggctccttaaaattcagtgactttatgagctggtatagcttcactgtttgtgggaattccatgcaatctcctttgacactaaaagcttaagtcccatgatttgcctttgtggatggaaggccttggccttcttttatgatatatgtgttggggggaggcatgtggtatgtggggcgggtaaaatacgagcctcatgcctgtctaagctggtgacttggcttggaaaagatgatcattcgtcaacgcatcacaagtcacagggcttatctccattgttctgaacgatctgtagctaaacaaaaagataaaagctattaatattattaatagttgtagattaccgggaagagcgcatcctaaatcagccattagatttgttcctcatttctttgctttacaaattgtttttctgtatagtattggattttcaataaataaaggatgatataaacaagtctgcaaaccagcaagaactatataagccacttgctcaagtcaataagcgcatgctcacaaaggaacgtaaagttctgaagttcttctttggggcgtttgcaaaatgtcctattattgtcacctgcaggtggggggttggatattcctatttgtctttgtactaggtactgtgcttagcatttaacagtaaagtatttatattatgtgtgaaacccattgtgcagatgaggcagtttagaggctggaagaggcatagactttcccaggctcacacagctgggagataacggggtggatccaagatttgcagctggtgtgtgggtgatgccggaagattggcctttttcaaggacttagacaagtattgtactcatacattatttgcatttatttgtatgaatacttctgggttcctaatatgagggtacctaaaaagtacatccgctgcgcttcttgtaatctgagggagttgatgaacatgggccaaggaagctctttccttcgccttccgttccagacttccttttcgagtagtatatcgtgtatttactgttctacttcagttgcctatttgacctttcttgtcacaggctcagggaagattctttatcagataataaattattcatccccctcatagacataatcggttgctaaaatattctgagtttcctgtctccagaatacctaaaacttgtgcttggtacttatcctctaagttttccgtttcatttctcattctgaaaattttgcaccgacttagtcttgaatgttattcattgttctttgatcattgtctttgtgtcttctccttttttttttttttcctggccaccgctcgcagtcttgaaccgaatctttcaaactttatatccatgtaacctttgtataatgagggctgtgattaactgcagagttttaaagagtgaaagtcaagcataggtggctggctctgaaccatcactcccaataatgtgaaacccaaagcagatgcatcctttcattaatgtggggtcccctgagttcttattaagcaattttgacatagtttgaagagacggatttcatgttcagacagtgttcagccgccaatggctgaaaggcctgcttttggccacttggcatttagactccattatttaagaggggaaaaatatgcctgagactgtttttcatatttattgtgggacatttagagaatctcagactagcaggtgttagattaaacagaggagaaacggtccttgtggtgataaaacttccctacgcaaggacaagtagagaaacaactgtagatgaagcagccagtctcaggctggggcagcacgccctgcgataggttaaggtttattttagacaaatatttaaaatgcagctaatttttacatatgcagacgcaacccagtggaatagaggtagccccagctttggagtcatacagatctggggttaaatcccagtgtgaatactaactcactcggtgtccctgggcaaatctggtcatctctctctctcttttctttttttgagatagggtattgctctgtcacccaggctggtgttcagtggcacaatgatggttcactgcaaccttgacctcctgggctcaagtgatcctcccatctctgcctcctgagtagctgggactacaggcttatgccaccacacctggctaattttttttttttttttttttaatgtagaggaagggcttcaccacgttgcccaggctagtctcgaattcctctgctcaggcgatcctcctgcctgggtctcccaaagtgctgggattacaggcatgggccatcgtgcctggccttagtcatctctttgaaccttggctgatttacctgcagatgctaatatgactctcagattctggcacatagtaaagattcagtaaatggtcgttgcagggaaagctaacttgtccaatgcagatctgtaaaatatactcataaatcttgttggagcaatatttcttctttgtcttacttcgggctaataacaaaaatatcatacaatgagtggcttaaatatttattcttacagttctagaggctggaagtccgagacgagggtgccaaccttgttgagttcttagtgaggtccctctttctggtttttaagtagcctgtttcttgctgtgtcctcatatggtggagagctgagaggaattgagagagagagagagagaggtcgcactgtctcatgtgtcttgtaagggcactaatcccttcatgaggattccactctcatctaatcacctctgaaaggccctgtctccaactaccatcacatgggcaattagggtttcaccataataattttggagggacactgtattagtccattttcatgcttctaataaagacacacccacgactgggaagaaaaagaggtttaactggacttacagttccacatggctggggaggcttcagaatcatggtaggaggcgaaaggcacttcttatatggtgtcagcaagagaaaaatgaggaagaagcaaaagcagaaactgcctgataaacccatcagatctcttgagacttattcactatcatgagaatagcatgggaaagaccggcccccatgattcaattacctccccccgggtccctcccacaacatgtgggaatcctgggagatataattcaagttgagatttcggtggggcgcagccaaaccatatcagacacaaacattcaattcacagcattctaccccagccctccaaaattcatgttcttctgacatgctaaatacatttattacatccaaatatccccaaaatcttaactcattccggcatcagctgtaaagtctatgtctttttaatttttttaaatgatcaaagcactgggaagtagccacttctttcctcagcttcccaccaatgtgtcaattaataatctgactaaggtggccgggtgtggtggctcacacctgtaatcccagcactttgggaggccaaggcgggcggattgcctgagctcaaaagctggcgaccagcctgggcaatacggtgaaaccccgtctctactgaaaatacaaaaattagctgggtgtggcggcatgcgcctttagtcccagctactggggaggctgaggcaggagaattgctttaacctgggaggtggaggttgcagtgagccgagatcaggccactgcactccaatctgggtgacagagcaagactctgtctcaaaaataatagtaataataataataataataataataataataagaatctgactaaggttattaaccattaaggtatgctgtgctaaggagcagggggccccttccatccgtagagggcagaaaggtgcctatcatgtcttcagtgtcagtgccctggtatggagctagctggccttccacaggttctggagttaatgctggagagaagtaggggtgtcagagcctaccctgtgttcctaggggggttcatctggagctagtccctgacccttaggtggaagatgcagctatgcccaaggttctgaagaccctgtaaaaggaagccttagaagtggctgcgattgttttaaagtctgtccacaaattctttgataattctcctttcaagaagtagaggccagttctcctctcttggaatatgggctgtacttagtgactcactctccatgaatagaatttggcagaaatggccgggtatgactcctgaggtaggtcctaaaggcttcgtggcttcttcttgctcactctcttggatcactcaccagccaccatgttgtgaggaaactcaagcagacctgaggtgaggcccatgcaacaaggaattgaggccaccagccatgtatatgatcccccttggaatcctccagcccagtcaagccttcagatgactgaggccctggctgattcatgtcatgagagatcctgagtcagaaccacccagcagctaagccacttctgaatccttgacccacaaaatatggtaagataccaaatggttactgttttaagccactatgctctgggggaatttgtgatgtagcggtagataactatcacaggatccatggcctcaaggggagaaggatccttaagagagactggacagtgagttctaaggataagacatgtatacttacccaggaagctccactgtgtgcaaggaatcctaagttcccggggttgcatccatctcccaggtcaccttgtttgacctctctccaacacttttaaaacatacctgatcaggaatcaccccgctttggcataagttcctctctccccatgctgcccatcccatttctgcacacctcttaattagtaagttctccctcatattgaaggcagaatcttcctctgagcgtcttctatgcaccggccctggtcctgccctccgagttccactggctgcattctcatcagaacccagctaaaactcacgtctctcaaattccctaaataataaatccaaagttattgaagatattgggatactaaaagttggcagtgagactggccccactcatttctttgtaacccctgtccctctttttattattgaagcttgggatgcacttggtaaggctaggcagctggagagcgtgcagactcaggagccaagacctgccttgccttccctggagttaatgaatcagtgtgaatgaagagcacagtcttcttttaaatggcaggggaaccatgcacttatttaccggcaattctcagattctaattgttccgactacaatgcgtcctgtaaaccgggtagctgggagaaacttcaatgcatctttgtaatggctttgttgttgtttattgagagggactaattaactttgattattgcactaatattatggcactttgacagcccttcagatttatgactctgggaaaataaacaaatgaaatgcaggtgctggagcagaaagaataagttattactgaactttaattacttggaatgcgtagccaggagagaattagttgatgaattacaggatgcttaaaatctacatcaaattgcaagcaataagaagataaaaataaaaaggaaggggcaggaagggtgctatttttaaggcagggaaggataggatgcatttgcagtggtctccgtggtgtttcattgattaaactttgtggtctctaatgctgcagatatgtacatggtgctactcaaagcatggtccctgacctgcagcatcagtgtcacttgagagcttgttggaaatgcaaattcttgggccccaccccagacctactaggtaagaatctctggaggtagggcccagccatctgtggtttgcagttactccaggagattttgatatctgcagaagttgagaagcatggctcaacagttctcatgcagcttgctttttcttttataaaagggcgggtacacatttttatctttgcttatgaaaatcaaatgttttcccaacccagtttaccaagtagctcccaaattttcaagctattttaaaaattggctgaaatttaaaaattttgggcaattttaatttatccaacatctattacgtgctaggtggtagagtgggtgacacaagatagtctagaaggattttgctaatgaggtgatacccctaaactgtcatcgatgccagcgcctgggtagtgtggtaagagtgatactcccatgactcatgaaagatggtctccccacgtgctttaaagcaggatggttgcaggagaaagtattggtggactgtgaacagcccccatggcaagggtgcatctggagctggaggaagagcatccacagagtgtaagtagtttgtcctgggaatggagatgtcaggcttgggtgtggtgtcggggagagggcaggcagctcctctatgaggccagatcattcggggccttggattccagtcttaggagaatagactttattctctaggtcctggcagccatcactggctgagtctgagtggtggtgatacagtccatactcagtgactgagatagacagacatttgggctgaattagcgaggggagtgcggggtctggagactctgttggcctgttggccatggtcctgggcgcaaagagcagaaaaggacgagacggggactgaacagacttgcttagttcctgacattcaaggaagaactttaacgtccatccacggagcctcaaaggctaaaaataatcatccctttcaatagttcctgttgtgaggaccattaacaaattataagagaaagcattcctcacttgtagaaactccatgaaaacagacatgtgtttacttatctgcaaccctgtgttaggaggagggtgatgagacactttactgtttgaatcaggaagtgctgacagtgaagggaggagctcttcataattatacccggagagcaggcaagacagccacatgcaagtggcctggcctggctgggtttggtacagaggggattagggcagattcaaacctcactggtcccccgtcccagcacttctgtgctgtctgcagttactaagcacttttcctgtttaagttgttgctgttttcattcccgcaaaagctcagccagcctctagcccaaaattgtctctgtttattggacagttggaaatgtcactgtggccccacagaccttgttgtcaagcaggctgctacgcttttattctagagcgtctttcatctgatttcctccaccatctggaaccttctggattcttcctcttatgggtagtgatgggcactttaggagtaggaatacatgtcagtgctagaccacatcctttcatacccggaattcgcatagtgacatttaaaaatagatagcaggccaggtgcggtggctcacgcctgtaatcccagcactttgggaggccgaggcgggtggatcacttgaggttaggagttcgagaccagcctggcaaacatggtgaaactgtgtctactaaaaatacaaaaattagccagttgtcttggcgcatggctataatcccagctgctcaggaagctgaggcaggagaatcccttgaacctgggaggcagaggttgcagtgagccaaggtggtgccactgcattccagcctgggcgacagagcgagattccgtctcaaaaaaaaaaaaaaagtaatcattttagaattgctttctcttcgggatggtttacctcgtgtttagtctgtaaacgcggataaccgagagctggtcaaatgtttacatggggctgtggaccattttgtatcattggaggagaagccagggcacttggcaggggtgttcatgatgataatcaggtggctgggtggagtcaccatttgtggcatcctcaaagacttgccaacatagacatttttggggagacagaaacacagaaataattctgcagtgctttaaagaatctgttaaaaatcaagtttctttcagtcatgtatgatccattgggctttatataacttttagcctttgctttgcagggacagcaaagatgtgagcaaatttgtgcaaacctaatagggtgaaaaattgaggtatgaattagtaaagtcatttgtccttctggaaagagttatggattaacagattacatttgggtatattgtggttgtgaaaaggtaacattctcagattggaaaggactttctgagatcatccaacttaactttccccacttgacagacaagaaaactgaggcccacagaaggtaacttaggcaattaattaattatagttaataattaattctgcctgcagaacaggaatatggcccccaacgcttcatgcttaattggatggcttattaaattcttatttttatggtagtgatgatgatgataataataataataacagtagtagctagcattgttttccagtgctaagcactttaaatgcattaattcagttcatctttatgacaacactatgagatagctaatattatgaatcctattttcagatgaaagactgagtcttagggaacaaacagccgagagatgaaatgccacagggatgtctaggttcaaacagcaacagaggtgcgtaccatagggatgtggaagccttgcttgtcttgttcctcttggtataaccccagtgagtagcatagcgcctggtcaattggagggatttggtaaatatttactgagtgagtgagagggtaaaacagctgagccatgggagttataacttgggcagcagtaatcctgccattgtaggaggggacagatcggctggttagtttttggaaagcagaccagcagaagttgcaaataacttgttgtgttttcctaagtactgagctgtgtgaattggtttcatgttgatgttactgaagtctccccaattcatcatctaccttgtagcttgttgaagaaagagtccttatttacagtctattatgttaaacgtattttattccagttctttgaaaatgacccatcctgatttggaaaatctctaacttgcctggtcattctggagcagtgggagccgactgtgatgcagagtggactcataatccagcttgattttgagggacagaaacctgggcctttaggtagaatgaacagcttaaaaggctgcacctgagagtagggggcatatgggtaaatccagctgtacccaagagttgggggcatatgttagccctactgggtaaatccagctgcacccaagagtagggggtatatgttagggctagtgcgtaaacccagctgcacccgagatatggggtatacatgagtgctattgggcaaatccagctgcacaggagagtaaggggcatatgttagggctagtgggtaaacccagctgcacctgagagtaggggtatatgttagggcttgtgggtaaatccagttgcacctggcagttggggcatatgttagggctagtgggtaaacccagccgcaccggagagttgtgggtatatgttagggccagtgggtaaatccagctccatctgagatatggggtatacatgaatactagtgggtaaatccagctgtacacgagagtagggggcatatgttagggctagcaggtaaacccagctgcaccccagagcaggtgtatacatgagtgctagtgggtaaatccagcagacgtccggactgtgcttgagggtgtcatcgagagagagaaggttgatccgaagttagtaaaggctttaaaaattaaaaggcctgagatgatggtagggttttggaggtaagtataaaaaccttcttgttttctactacttaaagctgaaaacccagcttgggttggctttgcttctaatatccttcttcctttttgtttcataagtaattgtcctgaagcctgtcgagataaatgtatactgaaagagaaagacacagaggagagacaggcatacagagaaagagagacacgcagacacacgaaggggaggtggagacacggaggagggacagaaagacagagagagacagaaggagagagagagagagaacctgtctagcggtgtttttatgaggtttttagtgctgggctttgcatcgtggtgacggtgtgtgtgtgggggtgttgatcactgttttcagtgttctctgatcatttcttgcttagaaaggaggaaattagaattgttgagctatgatttgttttaatcagaaagaaattgtctaacataaatctcttcgtgagctctggaaaagcccctaaagcggccaggaaaaaaatatcaatactttgcaaaggaggaatgattgttccaattcgtggcttaattgactttaagccttaatgaaactaaggccggagcgggtggcacactccgtggctgggatccacagtgaaatctacgctgggagaggaggaatttagggtggtaatttggttctttgctattgacgaaattttctaattgactggggttacttaataccagataatatttttttcttgctataaagagagtaaatttgtttttttctgaggaacacaggaatttattttaaattacagctttttctattggaagcattcatttatgttggattattgttccctgagtgaaatttcactgatgctgtataattaaatatagatttttttagagatagtatatattttagatgtataagtggataaactggaggtatggaaggtctttatttaaggagaataaatagcccaccccatcaacatgatggcccttggaaaggactcttttagcctccgcgagttccttttccgcaccaggctccacttacgaaggactgcaaaaacttgctaacgtcatcagtctgaaaggattgagctgtaaaatgtgttatgggggcctaagcaacgcatctggaatttagccttcccaagttcaaatccggtttatgccacttgcgaaaaccatgtgaccttcacttgttcttattgcctcagtttcctcatctgtaacttggggatgatgacagtatttggatcacaagattgttgtgaagatgaactgaagtgctaatgtgaaatgttcatgatggtacccgagtacttgcggtggtacctagcgtgtgctttccaagtgctggcaaagaaaagaaaagaaatgcttggggctctgcctacctgtctaggctcctgtctggccattctctttcttgttccaaccatatcaaactcactgctgttgctaaaccttcctgtctctctgcatcttggcacagactatgtcctctgcttggaagggtctcagctaagcttttcctccccacatctgcctctgtatcctgtgagtctctgttcaagggtatctttcccacaaagctttcctgggcttctctttcctgtctcctgccctcccttccttcttttgttcagcacatcgctgtcaaccttcttctctgggtcaggtagagcactgagcaccagtgatatggcagtgataaagaaagcaaaggttctcactgggtgtggtggctcacgcctgtaatcccagcactttgggaggccgaggtgggtggatcacgaggtcaggagatcgagaccatcctggctaacaaagtgaaagcccgtctctactaaaaatacaaaaattagcagggcatggtggcgggtacctgtagtgccagctgcttgggaggctgaggcaggagaatggcatgaacctgggaggcagagcttgcagtgagccgagattgcgccactgcacttcagcctgggtgacagagcgagaatctgtctcaaaaaaaaaaaaaaaaagaaagaaagaaagcaaaggttttttcctcccaagaactcatggtccaagttttggtttttaaatatgcatctatgacagcacggatcacatagtgcattgattgtttgcctgtaggtctccttatttagtcaacaagcatgttttgatcctttattctataccagccgtcccactggactctcagcacatataggtatgcgagacgttgtccttgccctaagtgtggagacagacacgtaaattaatagtaataataatatctaccacccactaggggtctatgtgtgtatgtgttgggggcggtgtggctggggagggaagcaaggcctgtattatggcccaagctcaagaatattcgggcaagagcagatacaatgcctgtatttctcatcacttttgggtggcataggaccagttggttatgagcgtgaaaggttttctttgactttggtggtctagttagtggttgagaacatggattttggaatcagcccggtggaggttggaatcctggctgcgccgttctgtagcagtgttgtggatctcagacaaggtgttcctgcatatgcctctctatcttcctacaagaaatggaggtattgcatccccgaaccgtaggatgcttgtcaggattaaatgagataacagtgcctggttagtggcacatgctcagtaacacctgccaagtaccactcactgagccgaaatctcctgaataccaccccttcatgccttgcacatcctgggttctaactcattgaggtgcccccacctttccttcttcccatcaacaactcttgtgcccacgagggactggcctcctcagtgccacacagagcctcccctgagtagatttgtgtcattttcaaacaaagcatcctggctgcagtgttggattttgtaggatggtgaccgtttacagaaacctctggtccgtgagccaatttggagaaaattgaatcattctctgtgcctttcggcttgcatcctaaaagcctgcacaaacactttgggcaggcttcagcaacttcacatcaagggctcaattgcagctccaatataaaaacctcccccgttgctctctgtgtgtgaagctggattccatgcttggcacagacctcggtgctcacggtaatgcttccttccaccatatcagaaggtcctcagcagccgcagccacttaacatgctcggtgcttctctgtaggaggatttttaaaaagcaggaactgtcagggtcccaaatgttcagtggcacttcagccagaggtaggatagggattttgaagtgtttggagaagtgttttcatatttgaatttacggggatggggtgggctggggtaggcaagggacagactgtagcgattcgcttggtgttttctcatgatgccagagaaaatgacctcattatcatcatgctcacattcacctttgccaggacccctgtgtagaaataatcatgaacttagtgactgacaatcataagcgttttatgatttgtggaggatttatatgtgaaggaaaatggatgaattaaaaatattaaacagcttagccggcacccacatggatgaatcaccgagatctattttttccccgtttatactataaacatatggcatgaattttctgctctcattacagatgctgagagaaggcaaagacaaatatttatattacattcatgttttacagtaaaaacactgttcggtttgtttacacagttccactgttacagtttttatggtcggtaatgcaaccaccgtaaaagcaagtctgggttatatagcagatgtgataagccctcatactcagagagatgtctgggaaagaatcgttgatgtcacatgtacaggatcaacaatggaattatgtgttgggacagtctaagttatgctgtaataacaaccaacctcaaaatctctggggcttgaaacaacaaaggtttatttcttgctcaaactgtattttcatcatgagttgcttggagggatctgtgagatggggatctcactcagccaccggggcccacagagcagcctgcactgctggatgttgtgacagaggaagagagggatgtgctgaccctcgctctggctcaaaagtgactcctgccatctctgctcacattccattggccaaagcaagtctcagggccaaggagtgggcagtagtagggtgctgtgtgtgtgtacaaacccaccatatgtgcatagagggaggccgagaactggactatcagagaatagccaaagatttctttccacggtcatgtcaagcctttttgctgttatttaattgatgttctatttttaatgcaacatggaatcagaagaatatagaacaggcgtcaaagaccctcccgcctctgtaaccgcactgtttaaaattgatgagactctgtcttcattcgaagatgatctgataggaaggattcacagctttccccaagaatacaccacagtgcatacaaatcctcgaagccgcagaactttttcaagttgaactgtgaactgtgatttttttttttttttaagtaagtttacatgtagaagctcattggtagagagctttagatatattacttcccagggtggtgcatcctgtcaccatgaagtaggcatgaaatgctggagatatgcgttcattcaaagaaaataaaaaggcgcaattatgaaaagctctcaaagtgactttttattttattttttatttttacatggagtctcgctctgttacccaggctagagtacagtggcgtgatctcagctcactgcagtctccatctcccaggttcaagtgattctcccgtctcagcctccagagtagctgggattacaggcacccaccatcacgcccagctaatttttgtatttttagtagagatgggtttcaccatgttggccaggctggtcttgaactcttgacctcaagtgatccacccgcctcggcctccgaaagcgttgggattacaggtgtgagtcagagcacccggcctcaaagtgactttaacagcaacttaaaggcggtggctagctctgccccattcagtatggtagccactggccatgtgtggcagttgagtgcttgaaaggtagttagtccagattgaaatgagctgttgatataaaataacatgactcccaggtttcagacagtataaaaaaatcttaattaacatttttatattagttccatgctgaaataatatttgagacatactaggttaaataaaatatcattgaagttcatttaatctgtttctttttacctttttttttttttgacacggctcctggaaaggttaacaatatgtaggtgaccctttattttcatcagacattgccgacctagagggtaaccactggagaggaaaaaagtacaatttggtatttttgtcacaaatccttaattgctagaactcacagtttaacctgacagttgatcaattgatatcctttgacttgttggaattttattctttacattcgtcttttaaaaagctttattttatgccagatgcagtgcctcatgcctgtaatgtcagcactttgggaggctgaggcaggtggatcacttgtggtcaggagtttgagaccagcctggccaatatggcgaaaccctgtctctactcaaaatacaaaaagttagccgggcgtggtggcacgtgcctgtaatcccagctactgaggaggctgaggcaggagaattgcttgaacttgggaggcagaggttgcagtgagccaagatcgtgccactgcactccagcctgggtgacaaagtgagaccctgtctcaaaagaaaaataaataaaaagctttgttttaaaataagtttagattctcatagaagttgcgaagaatagtctatagtattcttcacaagggttctgggtacccttaacccagcttccccagtgatagtcacagcataacaatcaagtctgggaaattgacactggcatgataatattaactaactacagattttatccgagttctgctagtgtttgcatgtactcatttgtgtgcggctctctctgtgtgtgtgtagttctatgaaaagttataacatatatacatttggtttaccaacatcatagtcaggatacagaactgtcccatctccccaaagaaacaccctttaccttagtttttattctttgagttatatcttaaccaggttaactgagggtaattgtcttaggcaagttagtaccaaatgatgctcttggttccttgtctgtctttttgcccatccaacccacccttcacacatggccgagttatgccaaactttgcaagaggtgccaggtgggcacaaagaaaagaggactgcactcaaggaacttagtctttgaggccaagcacggtggctcatgtctgtaatcctagcactttgggaggctgacacaggcagatcacttgaggtcgggagttctagaccaacatggtgaaaaccagtctctactaaaaatacaaaaaattagctggccgtggtggtgtgcacccgtagtcccacctacttgggaggctaaggcaggagaattgcttgaaccgcggaggcagagattgcaatgagccgagatcgcgccactgcactccagcctggtccacacacagagtgagactctgagacttcgagactctgtccccaaaaaaagacgcaaaggagctcagtctttgaagggttacagaaacagtttcactagaaggtgtgacattgtgtaacagaaatcggttccttaacctgccaaagggaagaaaatagtgcggaatcttttctccaggtttcaggacccatgtctgttgtccttcctttaccttaacttcagcagggcaagaatggttcaagccacattagaaagcagttactttctcacccaattttaaaggagaaaggtagatgcggtgggttctagggatttcagtgacgtaacaggtgtttcccaggcattaagacctagtaaggtttccatttccattaggtattatggatgcattccaagaatttaattactataacatcacttcattcattgtaattccttactagagttatgagaacttgggattgtgtggtttcttattcaatcgattaaaaggtacttgctatagttttctaactagctatttatatgaaatttagtacttgtcaatatgtattaaatcaatacagttatatttatcaaagtggtgagaagagtttacatctgaacatagaatagattgcttgccttggccgggcgcgggagctcacacctgtaatcccagcactttgggaggccgaggcgggcagatcacgaggtcaggagatcgagaccatcctggctaacacggtgaaaccccgtctttactaaaaatacaaaaaattagccaatgtggtggtgggtgcctgtagtcccagctactcgggaggctgaggcaggacaatggcgtgaacccaggaggcggagattgcagtgagctgggattgtgccactgcactccagcctgggtgacagagcgagactctgtctcaaaaaaaaaaaaaaaaaatagtagattgtttgcctcagttgggaaaaaataaagttttaaggctctagaattggagtgactcagctttacttgaaaaatcccagaatagtaggaccatcatttagaagtttcgagacgataatattagggaaaaataacagcaaatgttacttgatagacactaaactctggggcatatgagatgacccaggctggaaaaccactggcttacataaaggtattgacagacccatgggtgttaagatccttcatggctactggggagaaatgacaggccttttgaaatcgtatcagtggttttccctgggatcactggaaataatacccctgtttgacaagatatgacacatgctctgttttaattctgcatttgactaacagaaaagattggtgaagatcagactctgctttaaagttattgaagcagggtacaaggaaaaggggaagggaatagaggctgcagaggagaatgggggaagggggcaggaaggtaaaatttggaggtgcaggcagagtcaaggtcatgcctgaggcccaaccttcctgttgaagctggtgtttgattcaagctgtggctgagaacgtgcagctcatctggagggtagagttgcaagacatgggttcaggtctgagccaagccagaaactggagaaagcgtggcttctcaagactaggaatacctagattccagaggtggcgtgggcatggggcacattgtgacaagttaacagcaagatcttcagagctgcagctcacctgtgccacgatggtctcctaggagccctttcctgctgtagtcccgccccgaggggtttcacttcccactgcctcttggtagccgtgggcactttggtgctctgatgatgtaacatggagattgtccttgtctccatcgctgtctttactggtgtatgcccatgaggtatgtcaaagtctgtatgtctttgtaataatgctggatcatttgtccaccttcagagacaactgaagacagttttaagtgaaaccacacagagggcatataccattgggacaagaggtctgaagtctatttttgagaaagagaagagatcaagtagttaacagccagtggctatcataataatggcacctaaacaaatccttcttttttattttatttaattaattaacttatttatttttgagttggagtcttgctgtgtctcccaggctggagtgcaatggcgtgatcttggctcactgcaacctccgcctcccaagttcaagcgattctcctggctcaacctcctaagtagctgggattacaggcacctgccaccacgctcagctaatttttgtatgtttagtagagacgaggtttcaccatgtttgtcaggttagaccggaactcctgacctcaagtgatccacccacctcggcctcccaaagtgctgggattacaggaatgagccaccacgcccggctcaaatccttcttacttttcctcaagaactcacttcccacccaaacctttcctattgtggcagctgttatcttgtccagcacatgtgtccacacttggtattaatagctccatcttaggaactatgaaagtgaggggggtggtggtaatttgcatgaactggtttgggccagttatggtctgttacatccttgctgaaatggttggtgctaagatgagcacttggcttaggccagaccagtccctagcctgtggagaaggggcaatctcttatctgaaggcctaggaggtgcagggatgtttatatgggctgctagcgcttagtttcctgccacagggagacagtaagaaaggtgacgtcaatctgagatgagagagagagcaaaacagttcttttgaccaccttgaccccgaccttgaaataaggtggaactaataaatcccgctttgtgctggagcaagttttggctgagtttctgtcacttgcaaccaaatcagtcctatccagtatacctagtgactctctggtctccaaaggctatgcctgctgggtactgagtgtctccccgaccgaccccatgatggctacagtgcacatcccttccagccaactctattgtgcacacatattcgtagggtgagttgggccccaggtagagtgattggctcagatcctgcatcctttcagggtctgactgtaatcacactggcatggcagggggaaagtgtattggatttcagagtcaaaaaccacttggtatgaaacccagctcattttctatgtggatgtccaacctgagccagataattaatcttggagatgacgctgcatacttcatcaagttgtaaagttgactgctgtgataatggagaatgctggacaggctgcttttcatgtcatgggttcgctatactttagttcccattatatcatcctgccaatccccatttgttgtttttttgggacccagggtatcagtcatctgatcattgtgtgactttctcaaggacctttacttgagtcttgcacctctggtccacaatgtccacataccagcttgatggtgacttgtgtcattctccatccccttgttaagagaaaatctactttatgagccctctttccaaccgcagtgttgaggactagaccaggcaagatgatgccgctggaccactggatccagctggaccgctagaccacagagcccctggagcctcccaaggccaagcccgccagccacacacacctttgtgagaattaagaaaagatgccccctcctcttggggcccacagctcctccacctgggcacccagcctggtgaacagggtgcaggctgggatttagccctaccttgcttttggaccattgagctactaagttggagcaacaaggcttgggaatttttctttgatcataggtaggaaaggtaaaaaaacataaatctgccaatagaaaatagcatcgtaatgagtttctactatatttgtttgggctttgaaaaatatgccgccacaatatatcaatgtatggtcccaacgttttaggaagttgcatttaaaaaatcttggatacctgttttgtacatattatatatagcatcccgtgtgaatatgttaattcctttttatgagtttcggtcttttttccctctcctatacatgattgctgttttatagctccagtttggtggaattaacatagatttcccacatggggaaggttttgggtgaggatttagaacaaggcaggttcttgatcctcggaagagattcttatctgagaggggatttgagaatggcattgcagagtgggaggcgctgctgtgtggaaaaatgaactggaataattattagaacagttctcagaatttacaggatatttgatcataggagtaactttcctcaggagtgatggatggaatgcctgtacttggaatatttttaaattaatctattttcattacattgaaagtatgacacacagagaacactaaaattggatgaggcactacctggaattatataaagaatgacaaagatgcggttatccatttattttctaggcaagttagttagcctctctgtgtttctatttctttgtttataaaagagggacaaaaataggacctattactatctaggtgacaggatcattcataccccaaacctcagcataatgcaatatactcatgtaacaaatctgcataagtacccccttaatctgaaataaaagttgaaattattaaaaaagaaaacgaaggccgggtacggtggctcatgcctgtaatcccagcactttgggatgctgacgcgggtggatcacatgaggtcaggaattcgagaccagtctggccaacatggcaaaactccgtctctactaaaaattcaaaaattaggcttggtggcacgtgcctgtagtcccaagctactcaggaggctgaggcaggagaatcacttgaacccagtaggcggaggttgcagtgagccgagatcgcaccactgcactccagcctaggtgacagagtgagactccgtctcaaaaaaaaaaaaaaaaaaaagaaagaaaacaaaaacaaataggacccatatccctggattgttgaggaaatacgtgaacatatgtggcacacattatagtgtctggcatacaataaatactttgtaatgttactggtgtcttcttaccgttattgtctcactggtgaccgtttgaaatgttgaagctttattgttacagataatggtggatatagtctcttccttgtttattttttgacagaatctttttttaaaaaagtttttatttgtttggtgagaatttacttgttacaggtctagtgctgttatagttgaatgttttgaattatgtaacttaagtgaaacataaagctatgacttgaattttgtggttagaaattttctcagtcgattgacaaggatggcgtattggccaccttttgccgcagtaacaaacaatcccagactctcaaggcttgcaaaaataaatgtgtgtttgtttgctcataacacatgtggctgagggttggccgtggctccacagtcacgggtgggctttcctgggctcagcttctcacagcgtctccttgcagggcccaggctgtaggagatgtcatcagggcctgcagagggcaaaacctcacagaggcttctgttcatacattgttgtacctcatgtgtgcgtcatattgtcatatatcaatggcagtagccaagaccaacagccaagaccaatgtattctgcccacaggaaagtgaggcaaaggcagggagggaatgataattgtgaacaaagaattcacttgaccaaagatggttttcttgatatggttgccacttacctttcagtaaaatagcacttcacaaatttgtttaatgttttatctcaagctcccagaagtagctaaaaccacgaacatacatgttgaaaatttcaaaagggaaaaaagaaaagaaaggcacatctgagtcaggaaaacattaactagtcttatttctgagaatcaaaccggtggtcttttcagtgatcagtcaccccattaaccacacatgaatggcacaagtaggaaatgcctgcttcaataccaagaagctggtcttatttagatctagtcttatatcattgaaatatcattagaattcttatggaaaatatgttttggctgtttaggggatgctaggggctggaagtgagaaggtttcaacaccatatgggtatgtgagtatagatgcttacaagaagaagggtagacttagccaaaactaatttgggatttttgtttgtttgaattgttggagggtggatgagagtgaagacatatccttttgaaacttaatttaatttttatttattattattattattattttcaattttttatttttattattattattattttctattttttatttttattttttgagacggactctcgcactgtcgcccaggctggagtgcagtggcgtgatctcggctcactgcaagctccgcctcccgggttcctgccattctcttgcctcagcctcccaagtagctgggactacaggcgcccaccaccgagcccggctaatttttttgtatttttggtagagacggggtttcactgaagtagccgggatggtctcgatctcctgacctcgtgatccgtccgcctcggcctcccaaagtgctgggattacaggcgtgagcaacttaatttaattttttaaaacaatatatgtctctttggagtcagggtgtttgttacagtgatgttttgcagacaggtttattggaactgcttggtaggtgataggtttttctttctgttttttaattaaaaaataagattggccgggcgtggtgtctcacacctgtaatctctgcaatttgggaggccgaggcgggtggatcacctgaggtcaggagttcaagaccagcctggccaacatggtggaaccatgtttctactaaaaatacaaaaattagcctggcgtggtggtgggcacctgtattcccagctactcgggatgctgaggtgggagaattgcttgagcctgggaggcagaggttgcagtgagctgagatcatgctactgcactccaggctgggcgacagagtgagactccatctcaaaaaaaaaaaaaaaaaagatttatgtcaagaattcacatttctggcctctcttaaaaatattggaagacatggcaataattatctgggactgaatagcagctgcttctttttgggacaggtgatcacccccaaccccaaacccctacccttaactcttctactcctttggatgttatccctgcctggtttaaccatcaaccctcttaactcccgatccttttaaacttcctctactctttttattcttagcacttagaacccactaacgctctatgtaactgtcttacgtgttccatttcttgtttctagactgtctccctccagtagaatgtgcgttctgctatacagcagtgctgtgtgacgcgatagcaggtcctttttaaacatctgttgaaggagaaaatgaaggcacacgtggccttgctgacatctgagtttgcaacttcttttatgccttctgctaactgggaccccagtgggcttccctgctacaccctctgaggttccccagtcctgccaagctgttccatccccagttccttggtgcctgctggtacttcaccctggagagcccagcccttccacttgttcagatctcagtctctcatctgggagggacagcttgagcactatgacctgtgtgaagcttttcccagtgctggcagactgactggaacctgctccttcattaaacctgacagatgcctccacctggcagttctaccctaagaccatgaacttcttgagggagggagatgtgacttttcatccctgggacccagcagctggctcacctcctactggttagtgggtgatgattggatggcttccgaatgaactcaggtgtcttaagtaccgttggtcctgacaccatggccaccttccagaaatttccacatgttaagattgcagatgcaggctggacacattagtgatttctaagtgctaagaaaaaaaaagagcggctcacacctgtaatctcagcactttgggaggctaaggtgggcgaatcaccccaggtcaggagtttgagaccagcctgagcaacatgacgaaaccctgtctctactaaaaatacaaaaattagccagacatggtgctgggcatctgtaatcccagctagttgggaggctgaggcaggagaattgcttgaactctggagacagaggttggcgtgagctgagatcgcaccactgcactccggcctgggtgacagagcaagactctgcctcaaaaaaaaaaaaaaaaaaagaaaaaaaaaagattgaacatgtggaatatgagacaaatgaaaaagattgaattccgttccaactgggcttttgaatttattttcgcacttcctattttttgagcccgggagtgcaagatgtaagctaagaaaagataagatgaaagtattgctctaacattctggcttccttctattagagaagaatgcaaatctttgccttatctcgatgatgggccccacttaaccctttgttttactgagagcacttttctgcagatgatcaagtggaatttactatgatggcctgtcaaatcttgaaataatctacctttaaggaagaaaagtttaactagatgattgtaccttttagccatatctacaattaatttgaatgtattgcaagctgtttaaaatattccattagtgaagaaggtaagcctagcttctggtaaatacactactaagtgtttatagtacatttcatattttacatgatttcctttataattctgcttatcttttcattctaattccctgaaggacatataaaagaacccctaaagagagtaattactgctgtactctttaaccaaggctccttttgcaaagagaaatctgagctgctttttaaagaaggccgtttttaaataaaaatgcaaataagctactttgtaaccacattaattacccacctagcctcttattaccatgtttgtattgtttgcaaatactatttacagtcgtgtggaaattaacattactggtcctgaggaaagattgtgttggggaggttgtgctttggaaccaattagggcgaaccttgtctccactgagactctggggaaaagcacagccttgcaatgtcaaataatagcattagctctgactgtacaggcagagtgctgtaattatattattggccctattttgcttctgcaatgaatttcattgcctgcattgtaaaatcagcaggtagcaaagtttctgctaatgatttaatgtactctctgatcattttggacaaaagtcatggtaagatccacaaggcaattttatcatccccactgactactgcctggtttaagcattttaagtgaagacaaaacatgattctcatctccttgtttcctggtgaattccttcccacacagaagagagaattacttgtctaatatataatttcaggcataaggagaaggtgatattgcattgcaaataatagcagttagtgggagttgagagccagctctgcaccagactcgtatcagccacttgacctccattattccttattccttggtacctctgcgccatctgtgatatcagatccttttttctgcaaggaaactgaggctcggcgatactaagaaactcagccagggtccgtcagctgtcaagtggcattgctggcacccagattgagggccatctgactccaaagccacctgactctttcccatataccacagtttctaatacgatattataccaagctttaatatgagcacacctcctggatgatgctgtaaattagttgcctcccaccacaccacatcaagtataatggatataatatgatttttcagaattcagctaattacctactgagctttacattttgtaacttttttgactgtccatcaaaatgtctttgggattaaaaatttttttcatatgttttgaggtcaatttgaatctgagtttaataaacgttaccatgaaacatttctcccatctttttaggaaatatctgtgaataaactcattttgtgatagaaggctgtgtgtttatccagttttcatcctaaggagagggggagaagggaaataatacttcacgtctttattgcatgccaaacgtttatagacattatatgatttcatcctttaataaccccatgaaaaggatgtcattgtcttcacttgacaaatgagggagatggcagtgcaatcaagacatactgacaaggagaggaggtgagcgacttgcccgaggccacgctgctgataccttggcagaagcagaatttgaaaacagagcccccatatgttttaactgctcattggaaactgactaggtcacatactcctcctccttccctgtactggtagtttttcttttattttttttttaaatttcttccattttctttcctttttacagcaaatttgtagttatggtggagcaaagggcagttttcactcctcttccctaaaactgtagtttaactaaaaagtggccactgtctcctggtagcggttggtaagccatccagtctctgcaggcatctacgctccaggtctccagtctgaggagtctggctcctggggcaggtgcctctgggggtctctgccaggcttgtctggtcatgcagctacttccagactgattcctagatcttgcatttttacataggacatccccagcattcaaagaagatcctgggaactggattcctaccagaggaattagaatgaaaccaacaaaactaaaaacgacaccctcccccatcccccgcatccgatacacatgcaaggtaatatttgatgtcagtaggaaaaaaatccagtgttataggagacaaaccatagcaagcaatggcctctcacccttcccttcacaccctccactctgtccacttgtttgttccttcaataaatactgatggagaatgggctctatgccagtgtttctctggatgttggctgcagggatgaacaaaggcaacttctaggagaaatttctgtttttgatgctctcgtggctgcttcctgtgtcttaatattgtgcttaaactgccacttcttcagctgttgatttcaggcactatctaatgacttttgctgttacgagcatggatttagctcatttttaccatcttccctagttgtatcaccttcctcccattatgtttgtaacttcagattttgtatatttcgcatatgtcaatatgtaaacattttatatatatatatatgcattcacacacatgcatacatatatgtaatggtatatatacatgtaagtttccatttttgctcaaattgctctggacagttctttgctctgggagttctttactccctttctcataagaagaggctgtttgtaccctgatcaatccctctacctcttcttttcccctttcacccgtaacttctgctacttatacttctgccttatcatggtccataacattcaccttccactctgtagccataattaaatctcccatgcatcccactttgggaggctgaggtggatggatcaccaggtcaggagattgagaccatcctggctaacacggtgaaaccccgtttctactaaaaatacaaaaaattagccgggcatggtggcacgtgcctgtaatccaagctactcgggaggctgaggcaggagaatcacttgaacccaggaggcggaggttgcagtgagcccagatcgcaccactgcactccagcctgggtgacagagcgagactccatctcaaacaaacaaacaaacaaacaaacaaacaaactaagaacaacaacgaaaaaactcccatgtattatctatggattgactgtaaaatatgagaagcaataaatatgttcatcactagggccatctagaaatttctaacccaagggtcaactaatctttccctgtgttgtatttcctgctctgcggatccggcatcatgacctttgtactacccaggaaagccagtgttctcatgggctcttctcttttttatgctctaccagatgctagcactgtggcatgccattcgctcactagcagcttaaagggtacaggttctaaatctccttagtgctactcacctgttatttctgagcctgcgtagatgatcttcttttattcagacgtctgtgtcacatatacatgacatcctacccccttcccataaaaaaaatcacatttgtgaatgtctctcttaggctgagttccagactccaagatccctcttctctcttgtcagaatccagcagctgatggcatttatgtctgtagatttcactgtcaatgagtcattgacaggctaagcaggctgttggatggagtgatcaatggtatgagggaaaacactaatgtatgcaagaagagccatttcctagtaggaaaaatatttatgtatggagccacaaaggtgatcgcttcagtagaaatcaccaaggacctggtagtcaatgtgcaacctaattttctttcaaaagctgtaggaatggcaagggaggaaataaataatgcatttctttatatctcctgttttaagttactgagtgtcgccaagagatttctaaggccagacattgagtcagctgtaaaactggaaggagcaatgtttgctgactgttgcctcagccgctgaccctgatctcctctgcacgtagtaggcagcttaaaaattcctcgcccgacttctgattttcacgtgactcactgcttagttgtctgggtttgttttaattcctttccccctgctgacagttctttaagtggatgtctataaaggttggggcattcgctcttacaacaataggaaaagaaaggaggaaggaataaaaaagagagaaaaggaataaaaaaaagtttggtttagatgtctgatttctctgagcctcagtttcccagcatgtaaaatgttgtgagggctcacactggtcttgtccaggtgcttagtagagcatccattacaccataaagtatcacaaaaatttttaatatcatcattattactgtgctttcccttgagtttttttttttttaaatcagttaatccacatactggcagatctgacttccttgttttaggccctggggaatttttgttatctgtagagctggattaattttacagtgtggtgcctttgcccaaggtgaacctgtctgtttatagaaagtgtcaccaagttctgtcttgggcccgtccactcggttatatgtgctggaccctgggtggaagcactttgcacgtgtgcattcacgatgggctgtgctggaggggaaaacaggcatcactcccaaattctattcatgcaattaaaaattcctttcatttttatttgtgagagggtatgggtgcacagcagacggcaaacagaagaaaagcttttgattgaaaggtaaacatttacttctgccttttaaatagacatagcaagtctctttactctcatggaagcagttataaggaacatagagctgaagagaatatgaccatttctggtcttttactatgctcgtattaatccaccctggatagaagggactgtactatttggaaacacctaaataaaatgtttttgtcttaaggtgttaaaatgtactcattaatgtggcagtgtattccttttcttctgtgatcgttgaagtagggaaggaatttcaactaagaaccaaaatgattgtctgttaagacacttattttttgagaagacaaattaatataacattattatgtggggaatgtggaaaggctaaggttgtattgaaaacttattaagcttatgagaatattgaaagcatgaggaggcatgaccggaaggtattaatgatttgggcttgattattctaagactgtattctaagtctaaaatgttgataactaagacctgaaatgataaatgtttggcaaaaccaaataaatgagtagcaggttgaaaaaagaggcaagagagaagtagatatttatagttttctaaaacaatttagtcccttctggaagagagtcctacctcagccatgcctaccaggttgtgtttgtgggattatttctgagtcacccttaagctcatctttacccctctcccagacccccagtcccctcactgggcattccttggattatttatttatttatttatttatttatttatttatttattgtttgagacagtctcactttgtcaccaagtctggagtgcagtggtgtgaccttgactcactgcaacctctgcctcccaggttcaagtgattctcttgcctcagccccctgagtagctgggactacaggcacgtgccaccatgcctggctaattttttgtatttttagtagagacgggattttgctatgttgcccaggctggtcacgaactcctaaactcaggcagtccacccgcctcggcctcccaaagtgtaatcctggattataggtgtgatccaccacacccagccttccttttgtttttgatttttcctctttaaactctacttgtaaccacccctttcctttcccaaacttttactagcttcttccatcctggacttgcaatctggctgaaaacctgctaaataagggaacaattttgacatggctcctgtactccccacaaacctagttgattccagaccagtaatgtcttggggacagtgttgtcccatcttcctttctaggctgggctcagattactgacgtggaagagttgttggtcctggtgcaacatgccatgaccatgaggcctctggtagaaaggaaggaatgaagggtggttctccaaacccttggcccatgcctcatccttctgttcccttccttttccaggtacgtagctggtcaggtttcttaaattccgtcgatctggctttatccattttaagccttaggttgttggaacatagctaagttggtcaccttttcaagaattgaatctcaaaaaagccatgtagacctcggttgtaaccatcacattcattgacttggttgttgatctgtttgtcagatcagttttctgtttggggaacatttttgtaagtgcatgtatttcagcttttaacattttaaaaataaaatttcattgggaaagaaatttcattcgactggagtaccaggaacttagaatgaatccatttgtcagcagtatttataccctgtctaaaagagtgtcctcccagttctctgtctctgtactgtgtccccactttaaaaaatagctcaacctctcattatatttgcaattttttgtttttttcattgcctggtgggtttttttttttttgtctttttaaatgctccatgtagaaaagaattcctggaatagttcttggaacagcataggtgaataaatgagcaattattttgtcctcagcactataactgatttgagaaggtcaaaacagaaaataaaaacatgtttcagtagtaccagttcctgcacaggctgtctgccaactatggaagtaaagggaatagaattaggctgtctggattatagtgggaaaacaaaacacaatcacatcctgcctcagcctatccttgaactggtgtctttagaaaggggaggtcaagtaaaggccataaggctggatggtggggaagaaagaggcctgggaacaggtgagaaactgcagagcctggcggagttcatttaacctcactgtggttctgttggacttagtgcaaaatcaagagacccacctttgcctgcccatcctgcaatggtttggggggccccaagtagatgactggggaagatgactgggaaactgcagcactggttcatgttctgggacaaatcaatattaagcaagtttaatgatgggtaggttcattcaaaagggaaatatgtttcaatggagaagagaaatttgttaggttgtataataaatattttgagtgtatttggatagaagtttatgacggaaaaggcaaaattctctgtgtctttatggggagatattcgatatgttttttcttggcagaaataaaacatattcaataatataattaggcaaacttgttttagttgacaagaagaccgtatctccgtctgcaagatgaaggcaagatcaagagatgtcagttaacattcttgcgaccacaggtagggaggagaactggggaggaatttatggataggtgagagcataaaactagatgcggaagggatgggggagcaggtaaaataatgaggctcaatgttcaagaaggtcttgggcaagcgcgtgctagttattttcctcactggtgtggtcgtgacagatgaatcacattttactctcctccctttctcatagtatgattacataaaggagaccttccctggaaagagccctgtgcatggcttttgagagtgggcctgggctaacagtgagtgtggaagcttgctgccttgaattctttccaattctggagagttgatgggtaacaagtgtgtatctatagtctgcttggacatggcggtgtggccactgacacgttgtcagccatcccctcaactccagggacaggaatggtgagaaggtggtgagggcacagtctgcccggagacgggacagtttgtactacctgtagcaagagcatgtctttgagagccatagcagctggcttcctatttggagagaacaagaatgtgaaaagctatttattaccagatgtgggcagaccctccagcctttttttgttcttttaaaccctaatctctttttaaaattttttttatttttaatgtttatgggtacatagtaggtgcttatatttgtggggtacatccgatgttttgatacaggcatgcaatgtgaaataatcacatatgaagaatggggtatccaacccctcaaacatttatcctttgtgttacaagcaatccagtcactcttttagttatataaaaatgtacagtttaagttattattgactatagtcaccctgttgtgttgtcaaatagtaggtcttatttattccttgtatttttttgtacccattgaccatccccacctcctcatcaaccccccactacccttcccagcttctggtaaccatttttgtgctctccatttctgtgagttcagttgttttgatttttagatccaagaaacacaatcttagatgcatagtaggtgcattctgttgccatctgcatcatgggactgcacaatcggagaggcaggaaggccctgagaaatacctgattacacacctgcgtgctgggatgagaaatatgaggggaggagagaaaagatgagcctcatattgcatagcaagtctgtgatggaagcaaagttagaccctgttgatttttatgtcttacctccttgccattagttaggtaaatttagaccaccatattttctaagatcagagaatagagaattttaaattctagattcttgccttgtggatgttgaaaagaacaattaaaagttatttgggatatccaatcagttaataaataattatgaatgaataaactgttttgttgaagacactcttatggcagacatgaacatggggcttaaatcagttctgacatctagaagctcaaatccaggaggcagaggagttggatattaaagaactctgtggtgagctggacaggatgacatgacaattatggaagttcagagcacatagcagtcttttccagtgatggggatggaatgtgggggtcatggaagactttgtggaagagttgcaagtagaattattactgttgaaaagagatggggagttaggtagacaaacagaaaaaatgccaccaaacaataagttaggatagaaaaactccacgtatccatatgtcagttggcccatctgttcgttcatacatcctttcattcttctatccatccaaccgtccttgcatccatctatccatccacacaaccacttattcttcattcatctgcccatctgcccacctacccatccacccttccatacattcatctagtcatccccatccatccactcatctatccacccatccatccacccatgaatctatccatccatctgccaatccacccacccttccactcacccacccatccatacacacttccatctgcctttccaattatccacccttccatccatccatctacccactcatctaccctttcatacatccatacacatccatctgttcattcatctatccatccatgcatccttccttcgttgttttcttccttctatccatctattcatctacccaccccacccacctatccttcacccatctggccatccatccttctacccacaccttccttcctaccttccttccttccttccgtccttccttccttccttccttccgtcctcccttcctcccatcctcccttccttcctcctgtcttcctttcctttccttccttctctttctttcttttgttccttcctttctttcctccctccctttctttcctccctcccttcctcccttcctgtctccattattaacttgctggtattttgtttcaccattgcattgtgtttatcaatagacgattaatggaagaagagaagaaatcaggtgaagtctttgtaggatctagaatgtctaggctaaggagtttgaaattttttatactatgttctattgggaaccatttcagggttttgagatatagtatgatataataacagctatgctaaattctttgaagttattggtggtggaatatcaatccagaatgaaaataaataattttggaaatgagcctgtcattgaaatatactttatttctcgttaaatgtcccagcaaaagtattttggttgttaaaataaaggaacaaccattagaaaggaggaggagaagaattagaaggaaaaaaaaggtaaaggtaaagtaccttggtattttagggtttctaagattaggaactttaaatgttgaccccattttggtctttaccttcaaaagacgggagaaagactgagagaagtttctaagctgatgctgctctactacctggagtaggaatgagaaaccatctataaatattacctttggtgtttccatcaaaaatttagaatttcaccctattctatttttaattctggtttaagactgaaggggttcttggtgaatacttttgtagatacaattaatagttatgaaaatcattactgattacctccagggttcagatattgggctgaatgtcttctctcaccatcagaactaccttttgactagagtgttaattattaacatattttagattagtcagacaactgcaatatttaaggaatacgtccaaggtcacacaactaaaagaagtgacaaagtacggtttcagacccttttagtcttttctgtgttgcaaaattgagataatgataatagctaatgatacctctcccttactgataattgaatgttttatgtgaattaaaaagtttaatctgcatagtgtttcatcaagatagattccttgttatcctcattttggagatgaagagactcaggcatgcaaaggtgaagtaattttcccagggccagagggctaaggaaagggagaattgggattaattctacattgtctactggtaatacctattgctcatttttaccagttaaaactatttaatgagcatttgcccactttctaaaaatatgatggtcttagttacccacatggacctactctatcccaggcagatgccacaaattattttgttttctttttgtatatatttatgctgtttcctcatttttaaatagtgggctttgatgactattcttctacataaattattacatatctgtatcatagaatcttaaaaattatttgattcaagtgtatacataattttcatatccctgatagatattgccaaatatttaccagaagtgaatcaagtagtttttctaccaacattatctaagagggcttgtctttttacatctttgtcagcactaagtattatctcccttacttttttttttttttggtaatctttgttactttgttaggattaaagtagcttctcattttaattttcactcctttaattgagaagcagaacgtattcttttttggtgacttgtttcagagtctctttagtttgaagatacaatagatgtagcatctgctatatccggtaacaggataacagtgcattgctgggatgatgaggctgcagtgggctgtgattgtgccactgcattttcagcctgggtgacagaggaagaccctattacaaaaaaaaaaaaaaaaaagggtctgttatcaaccatgcttttttattttattttattttattttcctgtttctgagttagagtctcttttgctcaggctggagtacagtggcgtgatcttggttcactgcagcatcaacctcctgggctcaagcaatcctcctagctcagcctcctgagtacctgggattgcaggtatttgccaccacgcccagctaatttttgtatttttagtagagacagggtttcgccatgttggccaggctggtctcggactcctgacctcaggtcatccgcccgccttggcttcccaaaatgctggtattacaggcatgagcctctccatctggcctcagcagtgctcttctggctagcttgatcatatgccaatgttttattccttcgtggagctcagagtaagcttgttttactggacgttttctataataaagctaggggatggcgaatcattctaattaccaaaaagctgtctttgataacaatgtaggagataacgaaggcagaaataacatttgagtaattctttgccattctgtctctgaatcttgaaataaatactcttgaatttatatgttcttggtcctttaggagtcataaaaacataccgttacatatgtatatgaaacggtgagaaactgcgtatttattaagagtcacgacccttaggactagacaaatcaaattaaatctcataaaaacctgttatggaatatgaatacgtggcactattttttcttttagggtgtctttattaattttgtcatgtttaatatgttgcagttgcaaacaaaggcataaatgcatgcgttcattcctaattaatttatgtaattgggttttataaatttagctgtttaggaagctgtgcataacacactccatttactgtgtgctgtagccaataaaagcataatagaaagaaatatagtttgaagctcacttcaatggtaaatatagattagttgtaaatgatatctttgtaatgtttattttaaattttgcagtgctgcagattttctgaacataccaattaatgttcttatttgaaataatgactagttaattactataaattctaagtgctccatctctgacaattaaaaattgtcttacagctttttatttatttatttattttttttagatctttccaaattatattaagtgcagcatctggggaaagaagaatgggaatggaaggagtgtgtttaaaatgtgggtggttttgtcaattcctattgggaatgcttgtatttgaatgtatatacatatgcatatttatgtgtaatgtctatttcatgctaaatagggagtgatcaagttgaaaaataagaaatgctgtttgaatttttaaaataggttataaattataacatgaaaatcaaatacaatgggtaaaaccagtaaattttaaataagtttacatttgttgtcgtgatgtgactgtgacgttacctgagatctcagcaaggagctctgcagcccgaaaagaccaactggaatgatttgatcagaaagggaatgggtattaggctgctccactgatactttatccacttcgggagagagagccctgttccttcttcatctagctcaagccaactgtcagaaatgcatgtcagagctacacaattctatccaaggcattaactgttgtcaagtctgttttttatgaatatgtttcaatataagaaattgtcttaggcccaaagtgaaacgtcttcctccttgactcatagcaagctcatgcaggtatttgaacattgttctgtataatatgtgcacctttgagaaatcccatgattcttgctattctttgtaaatctaataccttccatccagagagagagtatacatgtggagtcaattgggagtaccttttgtatcctctagtctgagccttacaggttaaaggagaatgttggatttgcttttgaaagtatgggcttgcggagattaaaaaaaaaaaaaaagaaaccttgaataatcatgtacaaatataaatactgtatgtagaataagtgtaatggatcacatttatgatgaaatatgtatgtctttccaagggtaagaccttcataattcatttataagttaccttctttctcttacatgtaagtagcagaatagtaattttcttcgttctttctgaagaattgccacacagggaatgaaaagaagaaaggataaacttttcttaaacagcagaatgttattcagagataactggaaaaaagtacgagaaaagccaaaaagaaaaaaaaaaattgtgggtcctggtgatgttggaaaaatgacgtgtgagctgaagttccagacgccgagcttcatctattttgtcatgttatgacagaaatcattacaagggtgataggtttatttataaagacttgcttcaatattcaaagtacatctattctagcattcctcattttgagccaggctgtggatcaagatgaaagaaaaattaaattgtatattgaagagctcttaattgagccatgctgtatttaacagggaagcatcggcttcaggcagtcgataccactgaggatttttaatgccctgcatcatgagactgtcagtttgctttggagaatgcaaacaggctaatgacaaagccctgcaaacttttgtagttgctgctggtctctttggaaggcaagtgctaatttacccacagttgaaacctgacacacacacgcgcgtgcacacacacagacacacactctctctctctttctctgtctctctctctttctctgtctctcataaggaactaaatcctgcgttttctcaccagagggctaatgacacactgcttagtcacccaaaacctgtttcctaaggagccactttggggcttgtttaaagtttttaatgtaaggcattatataatattagatttcccctgtttttccttaatcaatgtaaattcaattgcatttcagagggtggccaagtggcatttcatcatctctaatatccatttaaaaatgttaggtctacccagttataattctccaaagtagcctatctgtggtttaatatgttatctacattctctaaggcagtgttaatttccttttgtagttaatctatcctactaccaaatttagtatatttatagttaaagattctgttaagagctaagtgatttaagtacatctgggataaagtggccttggctttaactatgaaacaaattttctttatttcattctcttcactgataaatccatagtaactggaggcatttttagaattgtgggcaatttcagcctctaaagtttgattaaagatacttcagatattcctactgagaggctagagggctgaaaggaatttattttgggttctggccctagtgcagctcagtggaagagaacagacattgtgagtttaattcccacgctgccaatttcccacgagtctagggtgggtgttacttctcaagaaggcgatggtagaaccgctggagacttcttatggctgtggcaggggactcacacgtcacaaggagtccagaggcatggctttgaagagctcttttcattcattcttccttttgttcacttgtacatcaaatacatgctgtgggcctactgtgtgctgagcactgatcttgtcaggttcttggggaagacttcattgctgaggtgacctttgagctgagtgtatgagtgcaagagagagcgatcacacctgggaactgcttaataaagtccccggcatcttgaagccacttgcagaccttggcagttgctgttgctcctgctgctgctgctgctgctgcattgtcaagactacattgatgtcttggaaatatagaaaaaagaggctgctggactgtgtgcttagaatcagtgtgctaactctgttaccaacaccgtagagaagtggttccagaaggaagagttcagggtgagaatgaataacggagtggctttgcagtgggaacctggctttgcagcacagctaggattggagaagatcttcccagcagggagaagaactcaaagaacatgcatgaagggaggaaggttgcaccagtgggagggaccagaatatggtgtggaaagaacgaggttcaaatccaggctctgtcattaactgcccctaccctctctgagctgagtttgttttggacactggagataatgcatgttaacatcctggtagctctatttatttgctaccatggtacataatcatgggagctctatttatttgaacatcttcttttgttattatttggtgtatttgggaaaggcatgtgggagcagcaagcaggtgagcatcctgtttggaatgcagggccgggaactgccctgcccagtccagcctcattccagaggctagcacctggcctcagctgtagagctgctgggagcatttcagctctctgcttctttggcagtctagtgctgtcacagaaggaaagctcactccatggaaaaggggggattgatttcttctctgagggcagaggctgatcaatctaggctggtaggaatagatgtaacctcagaggaaacaatttgcattggcgaaagcaagtcaatggccatccccaaattcaaaaggacagggaagtgtaatcctactgtgatccctaaagcatccaggccccaggaatggtggtgatttgccagggggaaatggaggaacaaccccttctttgactacctctgtagtttatattggattctgcaaagtcccatgaggactgatagatgggctgtgtctgcatttgaattttgtagctgaaatgtgggtgagttcacctaggtccccttcatgacaaggtggtgagaaacattttcttgttctacaaatctgaattaggtccacgaaagagggtatgcagcatagagaggaaccaaaaaggacgcaagatttaggatagatattgccccttgggaggcctgcctggtctgcccttgataactcatgaacagtctggtaatgctggaaggcaaagtaaaagccaacctcttgagaaagacatggaacacaggatggaacttgaactgcttaaaatggcttttctcaggccagctgcactggagtgtgctgctgtaacaaacacgcccggatctcagtggcttagcatggtgaattcatttcccattcgtgatatctgaccacagatgggaggtaaggggctgtgctttaaagtcattcatggatctggctgggcccgatgcctcacacctgtaatcccagcaacttgggaggtgggcggatcactttaggtcagaagttcgagaccagcctggccaatatggtgaaactccatgtctactaataacacagattagtcaggtatggtgacgtgcacctgtaatcccagctactcgggagactgaggcacaaggattgcttgaaccgtggaggcagaggctgcagagagctgagatcatgccactgtactctagcctgggtgacagagcgagactgtatctcaaaaaaaaaaaaaaaaaaaaaatctttcagggatccaggctgacctcagcaccatctcttacatgtgcctctgttctttccctaatataagggagcatgggggattagtgtctggcttaagcacttccactcagaaatcttgcttctccccacaatccattggtgaaagcaaggcaatggtcatgccccaattcgaaagataagtgcagtcctactgtgtgccctaaagaattgaagatcaggatacttatgagcagcgctcacaactgccatagtggcaatgcgaatggcatctatttttaatgtgactgagaaaataattggtcagatattgcaggatttttgtgggggagagggtggaaaagaacttacagattaaaaaaagaactggcatagcacctagattttaaacagaaggaaaagatgacattggggaccagagacagaaatttcacttctgtgccatgacaaataccagggagatgtaattgcaaaatgaagctgcaaatgtcttacccagggaactaggtgacaacctgcttggcttcatgaagaaggaataatatccaattaggctaagtgtattcggtgcctgagtgacaagccctggagacctgagggcttctggggcccccagggcggtttcaggaggctgtctccagacctgtccggggtgtgagcatgtcacgctgtggcccgcgcctcccctgtacagctgcctctgctcttctaagcactgaaatgagaggtgtaacctgtgttccagagtctgcgcctcccagccactggggcaggggcacctggcccatcagacttaccttgcctcccctgctgcccatgccctgctgcctagggctgggctcatgactgggtccacatcagctccacattgcagactgaccccctggaccctcacgtctcaggatccctatctccctgtcagtgctttgtcacccaaagtcaccgcagctcctcttgagtgctttcaagatcagaccgaggggtcctagttcaagctaattcctacctgtgcgatcactagccaagtactgaacctctctgaacttcaattatctcatctgtaaaaggtgttggtttgtaattgttcctacctcttagggcttttgtgagagtttagatgataaaccaccaagcaacagtggctggcattctgtgcacaatcgaagtctgctgctgtcagctctgtggtcgctgtctgcactcccacccctgtcatcctccaagtctgatctcctcccgaagtctcttcctggacctcagccctcagggattgcacctccctctgaatatgctgtcccttctaatcatgccatttagccacactgcctagcactttcttttttgaatattcgtgtcccaggtccctgaaaaagttgctaagcctgctaaaagcaaggcaaggcctttctttctttgtaaccttaatgcccagcaacgctccattcagtttgaccctcagttggcttcatactttgattttatgtctttatttgtttcttaatgagctactttatcattgtgaaaacagttaaatatcaatagtcaatgaataaatattaccaaaaaaaaaaaaaggtttgtcgtttaaaaatttggagctgggctggaaactagggatactacttggtatattttagttctactgatatgacagtatttgatacttaatcatattcaagcagctttacagagactaccatgagaatgggttaaattaagaggattgtctttgctgtttagccaatatgggccaaagttcagtggtttgagacatggcggggtttggtagtagatgtaggatattgctggggaaagagtgttagaggatggaagattgcatgatatttctggctttgctctttgactgtgtgctgtttgtaaaatcacttaagtcccatgggtcattttcttccccatatcaagcacctgctatgtatcaggtgttgtgctcacgtggtgttttatgcacagtgtttcctctttgttaatcctcatgatgattggtatggtttggctgtgtccccacccaaatctcattttgaactgtaatctccataatccctacgtgccaggtagggacctggtaggaggtgattggcccgtggtggcagtttccctcatgctgttctcgtgatagcacgtgagttctcgtgagatctgatagttttataaatggaagtttcccctggccttcattctctttcctgctgctttgcgaagaaggtgcttgcttctgctttgccttctgccatgattgtaagtttcctgaggcctccctagccatgcggaactgtgagtcaataaacctctttcctttatacattacccagtctcgggtagtatcttcatagcagtgcaaaaacggactaatacaggttgggcacggtggctcatgcctgtaatcccagcactttaggaggccgaggcagatggatcacttgaggtcaagagtttgagaccatcctggccaacatggtgaaaccctgcctctactaaaaatacaaaacagccgggtatggtggtgtgtgcctgtaatcccagctatttgggaccctgaggcaggagaatcgcttgaacctggaaggtggaggtttcagtgagccgagatcatgccactgcactctagcctgggtgattccatctcaaaaaaaaaaaaagagaaagaaaacagattaatacaatgatctgtgagatattgggactgttcttattcccatttcacagatgagccactaactggctcctggcaggacagtgaataaggggcacaacagagacacaaacacatcgctaaccaatggtctcatccgtcagccacactgcctgtctcagcatgggccctgtgtggaccattccatctcaatttgtttctgattcttgtcaattaaataagaacagctgaaaagtaaaataataaatatatacataaaaacaatggggggagtaataatgataatagatacaattttttggtctttataatccccagagcctggcttaattattttaaagtaaatcaacactttgaacacttgcaggttagaaaaccagtggactgatggatgcgttacagccattgtttccaagtgtattagtttctgctggccgctgtaacacattatcaccagtgtagcacctaaacaacacaaatgtattgtctttcagttctgtaagatagaagtcctacagggttctccttgggctaaaatgtagttgttggcatttctttctggaggctctgggggaaggtcgttccttggccttttcccatgacgctagaggctgacacattcctctgctatggcctcttcatttttcaaagccagcaagattgcatctctctgtctttcttttgtggtcacattttaccaggactcttctcctgcttttttttttctacctttagggatctttgtgatttcatttggcccacctagataaccagggtcctctccctatttatttttattttatttgtgagacagagctttgctttgttgcccagactggagtgcagtggcttgatcttggctcactgcaacttccgcctccagggttcaagcgattctcctgcctcagcctcctgagtacctgggaccacaggcacatgccaccatgccagctaatttttagtagagatggggtttcaccatgttggcgaggctggtctcaaactcctgacctcaagtgatctgcctgccttggcctcctaaactgccgggattacaggtgtgagccaccacacccagcccctctccctattttaatgcgaggtaattaacaaccttaatttcaccggtaacctgaattctcctttgccacgcagtctaccatattcacgggtttcagggattaggacctggacatctttggttgggaaatgggcatcattttgtctaccacaacgtgagagcccattgccctgcatccacagtcataaaagtctgttcccttcctccctgattcttcctaacttctcctgcctgccttgcaggatatgtggagttatcagttcctagcaccactggccaaagcgaggatagctgattgcactcctactttcctgctggtggaaacagcatgtatataggtacaactctggtgtggggaaaatgctaaagatataaagtagaaatagcctttgtgtgatgtgagcagcagaacaaaaatcgagggtgccaaataatcgtatgaagtggtgaactgcctaagatggaatattgctgttcctaaatcctggctgtgttgagacatgtgatcctgccgatgagatgagagctgaaccactctcttctcccagatgctgggcttccgaccttaatagagaccgagaaacttaacagagggctcagaagagaaatctattgaaagttactaggtgccaggtgtctcggaaagtgtttaacacatgcctgagacgttaaaggcaagattcatgcattctttcagcagacagtttcttcacttaccggggaagggggtgtaatatatgggggtatagggataaataattctgtgtgctgtgcaggccgtggagactcatcttctgcacaggtcaagttctgaagtcagcatataagctggaagtggagtgaagtcaaatgaccctcaaagatccttccagacttcatgcccttggcaactcagtttggacactcatatgctggtttcttccttgtatttatgcagcagcctccttttccacaaaaagcagaggccaacgtatctcaccccctcaatttttttactttccctctccctccctgtgcttgcctttcttttcttttcttttttctttttaagacaggctctcactcttgtcacccaggctagaatgcagtggtgcaatcacagctcactgcagcctgtaactcccagactgaagcgatcctcctgcctcagcctcccgagtagcttgtactgcagatgtgtgtcaccatacctggctgatttatacttatatttatgtatgtgcatgtgtgtttatatatatatatttgtagaaatgggattttgccatgtttcccaggctgggctcaaactcctgggtttaagcagtcctcctccagcctcccaaagtgctgggattacaagcctgagccaccatgcctggcctttgcttgcctttcttaatgtctttgacaattcatgtaaatgtgtgtatgatgtaactctataggactaagggtgtgtgaggatgccaggaggctgttggttgacaggagtcatgatttgactatatgaggtcacagaaaatgctttttaaaatttaccgccaacccacaggaaaactattctccttcttctaaggaaaaaaaaaatgtcacgataaagcagctacattaatgacaggcacatcaaggttttaacgtgttctctagatttatgatgtgtagcgtggtctccattctagaaagcaaagtagggaaagcacgactttggggccagggccctttctggttcagaatgtccctggccagtgtgcgccgtgcagtgtggaagcacgcttcggtgcgcatgtaagtttacgtgctatctgtagggacagtgatttttattcattagagtttttgagtctaattgtttttaaactgccacttttgtttgttaaagatacagatgtctggccatagaggaaagcaaggtggatttatcgttgcaattagatgcttcacaatttgaaaacttatcacttaaattggtgaaatgtcacttttatgcaacttgatgtttagaagtccttggcgtccaggactaaagtcatgtgcaatttaacaagatcttggtgagataaaggaagttgcgcttgaggaaacattgaaacacaccagatggaattttccaattccctcctacatgatagagactaggtgaagggagatagaccacaaattgattttgtgtaactcttaaattaagtggagcagagttaaaaaaaaaaaatcactggatttgaagttggcctatgttagattactccaaggaagttagttaatatgttaatatgaatctagatgaacattgagtgttttgctcttcttgttaatttgcgccatctactaatctctggacaatggagaaaaagtcgtaggttatgagttttttatttatggacattaagcaatatctttaaaatgtaaaatgaagccgacaaaatgcacagccagataacaacaacaaatctaatctaaagtgacaggaagagactctcccagacatttttctctttaatgtaacatgactttaaattgatgcaaccccacagtgattgaaaaactctcagagcttgtctcctatgattacatttctgatctgtacaacttaattttttaactcggtgagtctcagttttgcgaatgaacagttctcttttgctttctctctcatattatttgggaagacattatttggcaaccaggcagataaagctctgttaccacgacgaatactgagaagtcctaaaacaataaagaccccaagaactcaccctggaatatgtacctccaaatctcttctcttttccttctctccttctctttgtttttctttctcttcctgttctcttgttttatcttgacttctctcgactgtggtgacggtttgcatatatctgcgattgtactgaaacttaccaaacattgtacgttttaaatgggcaaaatgtatttgaactatatatatcacaataaagctataatactcttttaaagtgtctcctgaatcattaccagtataattattctgtgaactgtattttgatgaattcagaattaatttaaaatggattatccccctgtagaatgggaggtaatgctgaatgattgtgaatgattgtgaatgtttgtttattcggggtactccctcaaatttcttatccagtggtgtctagaacatgttgggattttgtgtgatagtttcttgagttggaaattgcgtttctttggcctcccatgtgggtatcaatgagttttacatggtttaaaggccagttatgtgatggatacttctattaccttatgtctttctgatttcatacacttaaatgtacagtttttatcttccttcaaaaccttatttttccgagcaagttttatttattcactttcagtcattactgaagtgaataacaaacatataacaatgctattttgggtcatagctgttttgctaagtaatacttaaaggctttctgactatatttttaatttctcgacagtctcccatggttattttctgatcataacttgaaaatcaaagctttctgttcagtttaaccatcttttaaaacccagtggttttagcttgggtattaacctttaacatagctagcgaaaattgaacatttttatttgaaatatgcttaatgttgtcttgtgtaagacaaaaagtttagggacaagtgaaccatttacttttcttttaatgtggaaagcagtttacaaatgctggtatgactaacaagaatgaaaggaccagaatggcagttctgagctagaatgtgatgagtaagtaccaccatagttagcggctagggaagggaggttgttctacagagaaacatgcccatcatttcttctgttacctggtattcactctggcaatttctttttggactcattctaaaatcaggattaaggatatccactgagaagcttgcatttattactctaagcaagaaacttctatttaattttttaaccatttgattcatatgtatttagattttaaaatttcattttctcttatccaaatgtatcatatatctttaagtaggtgaatcttggagtagattttattatatatcacatcacagagttaagctcggttcatctggattttaaaaatctctacagctttgagaatgactttgaaacactctttactgttggagcttaaagaaaataaatctctaatgtcctctgtattaattcacctgcttggaaagttagagattaaaaggtttagtaggatttttatattttctataatttctatttgtattggagtaaactgttcgttgtatggagtggcttagctttcataaaacagaaagattcctatattgagaaaagaggaagaaggaaaaagtgtaatataaatacataaaacttcctctagctttcttgtgttatgtgtaaaggagttagtacgttactttaattgtgtactttgaagaaagcaatctcctatttccattaatggtggactctgtgggtagagacatggatatttttccttttataagaaaggtcttgtctttcctcagaaggcattgtgagcaaaataagggaagaaaaagagaagtagataagaaaaacaaatcacaatattgaagcaggacccgagtactatagccttcctcatattttggtatctggaaccgaggttgctaattaatgacccaagagctaagccttgtttgatgaaatgcaagatgtaatacacagattgccttggagtgatgtgtgattattaccatccattcatgtgtaatcccgtatttggaaggtttgtaatttgtttttgacacatttctctctgattttatacactcatgcatacaggtctcacctccctccaaaaccttatttccaaagcagactttgtttgtttggtttgggtaattcattgggccctatttgtcttccttatacataatctattttcttactgctgcctctgtcttccaaaccaagaatataaagaatgaagcctggggactggaacttaaaacttctgccgagaaaagaaagtcaaggcctgtgggctcctaaaacatcctgtggaattcgcctcagatgcccctccatttgcactggtatatggaggatgtttgaaaaccaccagaacctattgtgtactttggaacaatggcattttcctgcttgattgtgaagatggccgctggaaaagaagccaactcccagggggcacgaggggctaagctgtctcctgggaagtttgagggaggccaagtgttttccagttcatttccaacgcgtatttcttcagggccaagggcccagctgtgcctcattaggggtgagagtttggctgtgacacgacttaatagaaaaaaaaaaaaaaaaggagaagtccaactagctgagtggcaacagaacttgggacaacctgtgcccacagcctttcatgtcctgtaatgagtgtgccatttgctcactgggaggagaaaaaaatgacagtatgcaacagtcaactttttcctgaagaaagagagaaaaaaatacatattttgcagccgagacatcggggtacctgttaactttaggcacagcgctagtgtcagccctggaaagagactccctgtgaacagcactttttaccatttaatcagcctgtacttcttcgtatttatagccctggcgaggctggcccattgttacaagaggaaattgtgatgttcagcagtttataccttgggagctggaagcgtttctccatggtgaatttgtaatattaattggccatgtcagttcatgacaaatgtagtgacatctatttcaagtatttcagttttatggtgctgaagaagtgacacgcgctccagataagtaatctcacaaaagatcttcccgctcgctgtggagcgcctccagaacatgctctcagaggagatgcaaataggctcagggttcagggggctgtccccttccttttgctcaaggctcagaggggagccagaggaatgcagggagggacgcactccctgtcattcccctttcagtctcaggagattctggttgaagctctggcatggactttcctgcccaagaagtgtccttgcggtgatcatttatgtgatttgggtacctgctgcttgtaggctgtgactgtcagtagcagaaataaatatattgcctttctcactgtgtacagtggtgctgtaccaagggtgactctgcccatcaagggacacttgtctggagatatttgggttgtcatatcttggaggagaataggctgctattagcatctagtgggtaagagcaagggatgctgtagaacttcctacaatgcacaggcgcatcctacaacagagaattgtctggccccaaaagtcaatagtgctgaggctgagaaaccctgcacttgtgtggaccatgcccttttatgcttttcaaccttgaagcactaataggtcagagaagaatgccagggatgtgttgatgggtctgcaagaggttgatgggggatgcttgagctcctaccaagtggaaggtggtgtaggcaaagagaaggatgcataggcacattggacggtggaaggcaggggctgctgaatgatgtggcaggaaacatgcaaagtgctcagcgtccctgggcggtgcagagtcttgggaagcaagaggatggagccatcctttcagtttccagcctgggtttcccaaaggagagggtgtttgagttcagtggcagagagagtggggaagagtgttggagcccagctgagtggccacctttgtcaaatggagctgagaaatgattttcacatggctggcgtaatggcggagtttccaaaacagcagcacaacaaaatagccatttacatgtcaagactatattcatagaatccatatgtctaaggtggggaagttgtcattattcctgttttatagatgaggaaacagaggcccagatggagtaagtgactgctgaagtacacatgatttgtcagtagaaaggaagagaccaaaggtggcatcaactttatctttccttcttttttttgagactggagtcttgctctgttgcccaggcaggaatgcagtggggtgatctcagctcattgcaagctccgtctcctgggttcacaccattttcctgcctcagcctcccaagtagctgggactacaggcacccgccaccaagcccagctaattttttgtaattttagtagagatggggtttcaccacgttagccaggatggtctctatctcctgacctcgtgatccgcctgcctcggcctcccaaagtgctgggattacaggtgtgagccaccacgtccggcctgtttttccttctttgttaagtggaacaagtcatttttttggtggtcatttccaatatgtaattcctgataacacacgtatatattatctctttaaaaattaaaaaaaaaaaagccagccaaaaaaagaaaatggaagtgttcaagaaactgccttttttcatgtaatagtatttctgtgtcactaaatccttcaacagcattatttttaatagctgcccaatgtcctaatggatgggtgagtcatgatttacttaaccaatcccctgttgttggacatacaggttattcacagcttttctctattgtaagtggaattgcaatgaatgtttttgtagtacacaccagtgagtgattccttggtgcgcttggaagtgctggttccaagaataagataaggctttgagattaattgccaaattgctttcttgaaatattgaggctactattttccagtatcttcactaggaataagtaacgtttttctaaagctgagtagtaagagaaaggtagaatctaattttactgtgcattttcttgattattagtgaagctaaacattattttttattgatgtgttaacaatttctttcttttgcaaatgatctattaatgttctgtgactgatttctatcttggtgtctttacgtttgtgaatggtaagaatttttatgtgttcaggaactatttaaatgttcaagacattaacctgtggttatgtatatcacaggtacagtcacatcgcttaacaagggagatacattctgaaaaatgtattgtcggaattctgtcattgcatgaagatcatagagtgtatttacacgagcctagatggatagcctactacacatccaggctatatggtatagcctcttcctccagggctatgaacctgtatagtatattactgtaatgaatagtgtaagcagttgtaatacaatgggacatatttgtgcatctaaacacacctaaacatagaaaaggtacagtgaaaatatggtattataatctgatgggatcggcattgtgtacatagttcgttattgactgaaatgttggtatgaggtgtatgactatgttttctcatgacctctgctttttttgtctttaagtttttaatttttgttttacttttgtcttttaattttaattctattgcaaccaaatctatcagcctgtcttctatgatctctgcttttaattgttacgctttaaaaatccttctccatggtaacattatattgactcatatgtcttactggttgaacgtgcctatgtttgactttgaaatcattaaattcattgaggatttgttttgccatgaggaattgggtaaggatccagctgattttctccagatgagtagttcattgtcccaacaccagttattgcaataagttattccttccccaggaaatatacctgggctaattaagaaaactgtgcttcaatgtaattattccaccttaatgcatgaaatattaggttaacatggaaaaaacatggcatcccatgttttagtattttttccttatttccaagcagcacctctctttgaattatattctgttctctgtttttataatttgactcccttctattctacatctaaatagtgcattgtctgttttcactcaggactttaaaaatagttctagtactaattgtatttttattctaatactgctattccttttactggtacttctgcatcttaaaaaaacaaaacaaaacaacgaaaacttggcatgttggctcacttggtgaatgaaagcatatactgttcagttgtttattcttcagcaacatctgagtatcctcgagaaatgagtggaatgaaccgctagagatgaatagccttaagccctcaaagctgagccctttggggtaacttgctctaattctgccctctccagtttgagtttaggttaaattcagcttgcagattgcaccaagcctgatgcctcccagccatcaaggaaaagggtacctaacattttgaatctccattaatcttacagctcagatcctgtgtattaaatctcagcattttcagggatgtatactctggcagaaaaactttaatgattttttttttctgatgctgcctagaaaatattagaaagaagacccttctttcctttcctttcttgtcctgtcctgtcctgtcctgtcctgtcttccctccctccctccctccctcccttccttccttccttctctccttctcctcctcctcctctccttttcttttcttttcctttccttcttcttcctttcttcctttatttctttcttcctgtattattttcttgtatagctcaggtctcactgctttgctgccattcttgtggagaataataggtaacagaggtgtgcacctggcctcatttattgtcacactggataggtaatagacgccggcatggctatgctgtggttcctgctgatgggcacactattacaggtgcatgataagtgtgtcgtacgcaggaagtacgtttcccccagccttccctacctgctgagggctgctcccagcctaaggatttcatccagatagattcatagcgcttccagtaaatgcaccccttgcctttcaaagttgaaaaagaaattactttggacacaaagaggtgtttcttttgacacagcaggcatgtgaaaaaataagcaaaaaaacaagagggatttctgttaccattggcatgtgcttctcttttacttctttagttcacaatgccagtggttcagcttcccgttctgatcctcactgctctaatctcttcatctgtgcttgcaatcacagccacgcgggctcgcaatattaccacgaaatcattttatctgttggaatctctttcctgttcattactcttttttatccccaggtagacaaacaccctaagtttacctcttgcgaattgtacgctttaaggttaaggaattcgtagttgaataagaatgacttttcacataaatttaatggagttttatcttctgagccaaggctttatttaaggagtcttgggaggtaatcatgtgttacctgagactctccgcccataggatgtagttcctttccattggaacacatggggaccgagggaataaagaatgttttcatctctgaaaatatctctcattcttccaatcaatgctgctcttttcttgcatactgtatactgggaagcatttgtttcgatttgtggttaaatgtatgtgtccactggacttcagtatccaccctttgaaggaccgcaggagaagttgttcaggtagaaacatacaagggccggatgcggtggctcacacctgtaatcccagcactttgggaggcctaggcgggtggatcacttgaggcctggagtttgagaccagcctggctaacatggtgaaaccctgtctctactaaaaatacaaaaattagccaggtgcggtggcgcaaacctgtaatcccagctacttgggaggctgaggcaggagaatcgcttgaactcgggaggcggaggttgcagtgagtcgagtcgtgtcagtgcactccagcctgggtgacagagcgaaactctgtctcaaaaaacaaacaaaaagaaacataccgggagatctggttctattgaaccccagtgcagccatgggtagaattttaggcttatttatattccatttcaccacaagatgtcaccagggcaccacaccaacatggtctatggaccctctctctggcaaatagagttatggtcatcaaacagcacctgcccagggctatggggagaggaagctggttggctttgtcacaaatgccttgatgtctctttcctcccctggggcccatctcttccagcctttgcatagagagagaaggcaggcaacaggacacaagaagattttcccagagtccagggtgttctcttacccctgaaatcgtttcttcactggatgggaaggcaggcacccagggggagatggcatcagctgcataaacaatttttctcctcagtagacatttacatgagtcaataggaatcatattctctctttttttttttttttttttttggagatggtctcactctgttacccaggctggaatgcagtggtgtgatctcagctcactgcagccttgacctcctgggttcaagagatcctcccacctcagcctcctgagcagctgggaccacaggtgcttgccaccatgcccaactaacttttgtattttttgtagagacagggtttcaccacattgcccaggcaggtctcaaactcccgggctcaagcgatcctcccaccttggcctcccaaagtgctgggattacaggtgtgagccactgtatctggcctaggaatcatattctcttcactgaaacatttcagatgacttaaaaattcaccttgtagaacttttaaaattgaaactttctggtgaacatcattagttgacagatatgtcattgaagtttcatccttcttcatttcagagtctgctggaagacccttcatttaccactctctccttcctggaggtgtggaaatactctacctgggtgaggctctcgtggctttttgtgccaagtgtccgtaaacttcaacttaattgttttaaatcctttgtggtgattatgcggaaggtcaaatctaacaggaagctccatgtccacttgatgtgtacttacttctatttttgcaccttgtgttgtttgttatcctgaattatgccagggctggtttgtgctaagatacttgttatttgacctcataataccagcatgtcccgtttgtataaccctctctgtagcttcttccagcatgtgatcatacatctacctaacctctcccattggttgaatttaatatactagtgaattttccattgcaaagatgaggttacgaatcatagtgttcatactcagaaggactttataaatattttgcctttttgaagtatatacaagaaatgaaaaaaaaaacaggaataaataaaaagaataaaaagagccaggactagaacctacaattcctgactcttgatcaaattgcttttctttttaactctagttaaatattttccattctttttaactcaagaagcctttgtttttgttgtcatcgttttatgattaacttatatctggtcctttagacatttagattttttctgttttatctctctctatatgtatatctgtatatatatttatctatatctatatagagatatatatatatatataaaataatgaatgaaatggactgtttgcaacctcagatgtatttctaggacttagagtgattagcttgaggcgatggtagtttctgtttttggagtctctgtaggtctcagactcacagtctgtacttcttgttttgggggctaattaagtggacagtttcagtgttggtagctcatttaagccataaacatgcagaccatgtggaatcccattagtcaaaccttagcagagtgccttgatgagtacctccttttctttctgaattctattagttgatgctttgttctttctccccaagagccatatctcagctatttcttttcatttcttgtgtatagttcaacatctttctttctttttttttctaaacaggatctcactctgtcacccaggctggagtgcagtggcatgaccatggctcactgcagcctcgacctctggggctcaagcgatccttctgcaacagcctccctagtagctgggactacaggtgcatgccaccacacccagctaatttttatattttttgtggagatggggttttaccatgttgcctaggctggtctcgatctcctgggctctagcaatcctcccacctcggcctcccaaagtgttgggattacaggcgtgagctaccgtgcccgtgcccggccttacgtttcagcatctttcaatccatctaatacgcagtgccagggaaggtttgtgaaaacatttgaatcacagagtcacaaacagtgagaatagctgcagttatgtttgtgatgctctaatgaacttacaaaaggccaggcctagtatttcagctgtgtccatgatgtctctgatggaaatggacaggtaacatgatgtacacaagcatttgactgttgcatcctttgattgggccatgttcatgcagccagcctgggaaagcaattagtagttttaagcatgggaaatcatataaaagtaaactaaaattgcatttgaattaattgatgaacatgtttgcttgaccatatcctgctgttaggcgtcttcaagttaacttaagtggttgataaaactttccaaaaagaatactatcaactgctgagcacctgttgtcagagttgtgggtaattcgcaaaggttttcaaatggaaaagttgttttctcctgctaggaagcatggtctcagatccacttctaaggtcagtgtgaaagggaaggcaaattcactttgagcaggggaggcatgatctggaagataaagcagctaggagtatagactagggggctgatggaggggaacacctatcacaatatgtgttctcacaccaatggtatatattttccacacatttagattctccatgccactccttatctctttagtgcagaaaacggagaggaggttcagtattcttaagaaactcccatgattgctttgaggcaatggatttaacaggtatctttatcccttatttacgcactgactgtggtactgagtcatccctggtgtttctggattttattggcaatgccaagagagcaggaagactgggacgtgaactgacaacatttatgattctggcagcttgacatcacccaactgttctctttgtttggttttgcttcagacttagtttagttttgttttttaagggctggggtggaggagagggatttgctcttgcagttttcctttcaaaccaaactctttcaaagccttttgcaaactcttttatggattttactcactggttgagcaagagttacttatgagatgtggcttcggcattttcacagtgtccataaaaaaatgtatattactatgcattgcacatttgccacttagaatttctgaatgcaaattaatcaacttgcagctgtgactaacaataaaacacaggataatgtacctacagaaatgagggcattggaaatccgctctcaggtggccatcgaaaatagtcagcctgagtgttgctacctgttttccataattgtgtagctttgcctttccttagttaatctgttcaataaactcctctgcagaatccaaatgcttaaattcagtttctttttgtctttatggtgtttttcattgttaacgtggcatcggagtagctcgacttttgcatcatgataaattcataacccaagagaaggcagaaaacataattattatcaattgcctctctcctggaattgccattggctgagtggaacaaaatacgaacttaaggagtagctgattcagagaaatccagggtaggaacgggtcccatcttgatttcaatgtcttttttgaggaggccttcccattgcacttctcttcaagtttgcccagatagtaagttctactagacatgtcaattttttctgaggtctaatcttgattttttttttcctgcacaatatggaattcagtgtttttatttaatcattcagtaagtcttgactgcctgctatggaggttaagccctttactaagttccaaggatgtacctgtgaataaggcaagttcctttttatcattgtctttgcagtctattaggggctacacaatttaaacagagaatatatataaaatggtagaaagtacaagtaagtataccttattttttttaaaaaaatgaatgtggtatttcacccacagcctcaagaatcactttccttaaaattgccagagtaggaaaacttacaattgaagaatttcaggtatttatgggaaaaatagtattagggcaattgcggtcaaacacattcgtctgttcgttcaattacagcagtaaggatggaagtctaaagagagtttctacgtgatcttatttatcctgcatttataaatacacaaattcttgtacaattaactcagtttttcactcctttcttgcttgcaacttgtcaggtcgttccctccccagtagttgtgaacttctttatgctagcttcttccatcaggggctcacaaccagggactgtagaggtttgcagaggtaaatcttggtagataaggattttatgaaaagggagctcactgttggtgaaaaatccttgtttctacagattttgggtcaagataagaaaaattaacttttaaaatctgaggaatttggagattatctccaggggctgaatatatttttatgggagaaataaaatggatagttttaaacttgaatttagtttttcctaatggaggcccttttgaagatcaaatgggatctgtaaaaactctttgaaaaatgtagactgcttcttatgtgattcttactggtctattatttatcaagaaattaaaaaggaatgaatatctgtagctgtttttctttttctttcttttcttttctttttttttaagatggagtctcgctctgtcaccgggctggagtgcagtggtgctatttcggctaactgcaatctctgcctcctgggttcaagcaattctcctgcctcagcctcccaagttgctgggactacaggcgtgcgccaccatgcccagctaatttgtaattgtttgtttctaaaaggatattcagtgcttccactgtcttttagaagtctgtagaaggaaggccaagaaagaaatacccattattttggctgaagatgatcactttagctgaaaccagttcaggttcaaactcagacattggtgctattttcatatatctgaaatgttctgaaaagattactgacgatcaacatgctgaactgacatttcacagatatgcagatttattcatctctgttcaaggtatgccttttccaatcataatagccacgtagaggacattaaacaaatattttattgtggtaaaaacacttaacatgagacctacccttttaacaaatttttaaatatataatttattattattgttgactataggtaaaacaggacatttttaacgtgctgtggtggcctattggactttcagcctccctgggtgtatttcgctgtatatgtgtaccatgtcagcttaccctagaatttgaaacattttcctttgatgattaaattttttttttttttttttttgagatggagtcttgctcttttgcccaggctggagtgcactatcgcgatctcggctcattgcaagctccgcctcccgggttcatgccattcttctgcctcagcctcccgagtagctgggactacaggcgcctgccactacacctggctaatttttttgtagttttagtagggatggggtttcaccgtgttagccaggatggtctagatctcctgacctggtgatccgcctgtcttggcctcccaaagtgctaggattacaggcgtgagccaccgtgcctggcctgatgattcagtttttaccccaagatgcagtatgcctcagtctcactaaaatatgccaatatgttcttcttcttgaggatcagggctgatttcttctactgggaaaatgtatcccctgtgtttggccccagaggcatcagggtaacctgctctcttccattctcaaagcagaaacagtgttcctaacattctaagcctgggaataggatggcaggtcgtgggaccagcattttaattacctaaagggaacttattgattttagtccagaacacggtggggaggagttcatattcttttttttttttgagtctggattttagaataaattcactgtgtacatagctattccatctttaaaaacctttgtgaatgttaatatacagcctttataaatttgaggtataatgttcaaaatgctctaatccctaaattttccagtctaggttattatacttttatgactattcattttgatgtaggccttttaaaatcaattcctccctgttattacaatgctgctttatggtatttgtgatatatcatatgaatatacttgagggtcatgagaagttcatatgtgtgtgtgtagtgtgggccccagactttcgccataccgctggctaaagtggccatgtttttgtacgtctctgcagagcttacaagttattcaacagccagatttctattctgatatgcccttttagttttcaaagcatcgaaaaagggtaatctttagaaccgaagtatttggaaaactcctagacttgaataaggtatttttgaatttgaagagctaagaacccatcaaatcaaaatgctaataattcttccaagtcaaaaggtaactctcattttattatgcattgaccaccattcactttctgttggactgcttttggaaaaagaaccacaagtctctatttttaaaatagaggtacaatgataaaacaaaacaaaacaaaacaaaaaaacaacaaaaaaaaacccacacaggtctcatcagccaagggatttaaaaatcaaatttaacttcaaaaaactgaagttgatatagcaggatcttggagatgcagtttcttcacttttcttttttttctaactgagggattaaggatataaacccaacttcaaatttctttctgggtggtcttgaaaacttaacagtaggtcctgtaaagaggtgggggagaggaaaaagaaatcctttactctcatctgctggttttaaaatgagaaaaatacacacacacacgtaatgatgttcgtgatgttaatggagggaaatatcataaataattaagaatttaaaattattataaaatatttagtattattgttgttactgttattagtaggaaggggccttgccatgcttcctttcttcaaacagctcagtactttaaaatcgagtgtggctgtgtttgtcagtcgtggtttgtgttctttgatttgttctgcatgttcttcttttggagaggatgtgtcactttgccaatcttggtccttgctgttgtctggtggagggaaacaagcctgccaggccggctcatctgacccctggtggcagggagtggaggtgcactcaggatgctcttggggaatcataaaggaggttaaagaaagggacagcagaaccctgacaatccttgcccctaagcatggaaaagcctccggaccgggtctggagtgcaacagaggcccctgaccttgtctctagctctctgtctgcatcttcagcgtggcttcactggtttctaagtctctggtgtcttttgtcttttgcagccggcttgcaattgcctccttctaactctcaaaaggatgcatgggatgggttcagtgtagtcactgttgtgccttttggacaaggctttccagccaggccaccctgtttacaaggctgtcctcacgtcatgggcgctcatattgtccagactagatggtcaaggtgattgggggaaggaagtcacagagccaccaattactaaggaactgcccagagatcctgcctcactgggaacctgtgagtgggctggtttcccccagcagaggggctgtagcatagcaggtacccacaggagcctgggcatggcctttttctctaaagggctggatagtcaatatttttagctttgtgggctttatggtctctgttgcaacttctcaactctcctgttacagcaggaaagcagccacagataatatataaatggacggatgtgttccaataaaactttatttataggaacaggcagtgggccagattcagcccgtgggccataggttgccagcctctgactctggtgttcagatcacagactttggatgtctcatatctgaatctttctaatctcgtgatagggcaaggtaattaaaatgttaatacgttagttttctcactgtcaatgtgttctatgacatcatttatgcaaagcatacaaagctgagaataaagtctcagcaaatgctagtttcctggcctccttatacatacttacaaaggatggtgggagatagtttgagatttgaggcctctgaagaataggtgtttttgtgatgattttggcttttcagtttgacagttggctttgcttttttgacagacacattaagagcttcaagggtcatttcatggtttgtcctttccatgtcagggacacctttcacgtggccattttaagcacaggaattgccttcaagtagtttactcgtacgaacttgtctgtaatcatctttccccatttggatggtgggttgcccattttaattcaaggtttgtctaatgtgttagtgcatattcttggctcaagcaggataagacactagtaaccatgaacctgtatatcaaaaagcgtgactagagtttcatagttaaacatgtgctgaaatccacagtggacaccagagagggtcatggaatctgggaatggatgacttgtcccatgatgataatatctgtgttcctacggctgggcccggtggctcacacctgtaatcccagcactttgggaggccgagatgggaggatcacgaggtcaggagttgaagaccaccttgatcaatatggtgaaaccctatctctactaaaaatacaaaagttagccggtgtggtggtgcatgcctgtaatcccagctactcaggaggctgaggcaggagaatcacttgaacccaggaggcggaggttgcagtgagccgagatcacgccattgcactccagcctgggtgacagagtgagactccgtctcaaaaaaaaaaaaaaaaaaaaaaatctgtgttcttgcctggcttattgagctccatggtaaatgttcagaggctgcaggaatgattcaaagtctgactgatttatgtgcattgggcattttgttgatgtcattcagattaatgatggcactgaaaatgtgtaatggaaatgagaagtttgtatcctgcctgctataccatgattccaatttaagagggggtaaaaatattgcactttttaatctattgttttttgaaagagactgtttaaaacacgtaattttgctaagttatggctcatatcgtatttgttattttggttttgaaaaattgagtaggaagcaattgcgttcttaaatgacttgaacatcaaaggcaagtagtgtcttgttttaggagcagccaggctcctatccctctgatccagccaagtgctttcacttggtcccactctggggaatcaccagtggttctcactctgggagaggcccctggttgacctggaatgacctagaccagcagtcacaagctcctgcccatggacaaaatacagccggtacctctttggctatggcctgcaggctcagaatagttcttacattttcaatcatctgcaaaaaagaataaagaggagaatattatttcttgaaggaggaaaatgatatggaattctgatttcagtgtcataaagttttgaatttcatcaataaaaaatttgcagaaatttgtttttctctcctgttatgtaaatacctctgtaatagcctcggttttgcctcttggctcacaaagcctaagttgtttactatttagccctttacaaaaaaagtttgccagcatctgatgtccaacaacaattttcagtcttttttgtagctcccaaattctctcattaaaccagatcccttgagggaagcctggtttacaaaatagattaagtgatgtggctgtttggagcaggaggctgtggtctgagtcttgctggcctcaaccctcaactcacttccacaccttacctcctggggataaggctgccttcgtctagaaagtgcctcggttccagcttggaaatatccatgtacagtcccttttttgttattccaaaacccaaagagatctgaaaagcaaaaacaaatttattgtatatttatagcaaatttatttggtggtgaaatttgacttcagctttagcgtccctgtttctcctttctagtgtgaatgttcattttgttttgtttgtttttttgaggcaaggtctcacttcatcacccaggctggagtgcagtagtgtgttcacagctcagagaagcctcgacctcccgggctcaggcgatcttcctgctgtagcctcccaagtagctgggactccaggcatgtgccaccatacccagccaatttttgtgtctttgtagagatgcggtttctctaccatgttggccaggctgaataatcatattttcactgaagaaatagaaatgtcattgttataggatgttgccccaaaccccgcaaaggtattttgtaatatgcagtatatgtgctaaattactttttttgttgttgttgagatggagtttcgctcttgttgcccaggctggagtgcagtggtgtgatcttggctcgccatgatctctacctcccaggttcaagcgattctcctgccgcagcctcccgagtagctgggattacagacatgtgccaccacacccggctaattttgtatttttagtagagatggggcttctccattttggtcaggctggtctcgaactccggacctcaggtgatctgcccaccttggcctcccaaagtgctgggattacagtacctggcccaaaatacctttctaacatggaggaattaggaatactgaaggcatcggcccccaagggtttgatgtgctcttgtccccaaggcctgcagatttgcatcacctctccacttcgtggactcctcgtacctgcctgattccaggatgctctaacctggccacgcatcccccgtggattctcagctgttgtgtgtttcctcctcaggtggccactgtgtctggtgctcacccacattttggttcatcctgactttgcctcagcctccccattctgcatttctcccacggcttctcccagccctggcccagtgacactgtaatgtggactgtggcatcccctgagtctaagctgttgaccagctcttgatggacagatgctggcagagatggggaaggtgctgttcccttcctcctgggaagggcaaagaaagcagggtggtcctcccatccccgtgaggaaggaagagcctcattcatgctgagaccctgatggagaactgggtccagggataatgttttgtgttcctgctcatgggactggtgtgttattgtcaagggatcttacaggccttgcttcccaggcccctctatcccctctgttcttgcttaggcattagtgatttggttcttctagctttttttctttttttgagacagggtctcgctttgtcatacaggctggagtgcagcagcgcgatcttggctcactgcaacctccgcctcctgggttcaagcaattctcctgtctcagtctcctgagtaggtgggtctacagtcacatgccaccacgtctggctagtttttgtattttttagtagagatagggtttcacttgttggccaggctggtctcgaactcctgacctcaggtgatccgccagtctcaacctcccaaaatgccgggattatagatgtgagccaccacaccaggctggctcttctagtttttgaagctcacttttcttttttcctcaagactcacagggaatgggaccaggcacctgtctttatacattctcaaagtccatggtgacgatgccatgctccggttctaagccagttggacagacacaggcaagggaagctgtcagtgtgggtgtgagttgcagtgtaagggtagtgggtggaatagcgtctccccaaaatccacacccacacagaatcacagatgtaacgttatatggaaacagggtctttgcagatgtaattagctaagaatctcaaggttaaatcattcaggctttagagtgggccctaaatccaatgacggttatcctcatgagaagaggaaagcagggggcacagtggtgggtgtgcctgcaatcccagctactcgggaggctgcggagggggcatcacttgagcccaggagttcattgccagcctgggcaatatagcaagaccccatctcttaaaaaaaaaataacaccaaaagacaaaacagaaaaaggaggagaggacacagaggagaaggctctgtgaagtcagaggcagagattggagtgatgcgtctacaagccaagagatgccacggtcatgggcagcccccagaaacgaggagagaaacctggcacggtttccacaaggagtcacccctgccaacaccttggtttcagacttctggtctcctgaactgtgagagtcagtttctgttgagcttgtgctgatacgctagggcagccctagcacactgccacatctggtttcccggaggaacttcacagggtctttgttctttatctacagtctctggaagtctcagcagcctcctgtgttcgcaactgtcattccagagcagccgtctcgtgttatgcatttgcttactcataagcaaatatttcacaagaacctgcgagggccaggctgggccaggcaggtattgcaggtgcaaggatctatataagacagtgccctttagaagatccctgtctcattgagaagcgttgagtaaatgggtctctctggtcattctctccagaacatgaagccaaagggctgagagggagagactccaagaatgaattagtgtccagcaaggtatcgcttgtctcaggatgacaacttgcaatttggggatctctcaacgtcctgacctccatctcagtgggcatgttcctcacctggctggctgcccctgcttactgatgcagcctcctgtcacacggtactcacctctattcactgtattccaccaacactggccttgggagccagcagtacccccattgtacagatgaaagtcttgtgactgtcaacattaaaatgagaatgatattgacccatgatacttacccacctgttcagtggattcggtgtgccgtcagcatggttcccagcacatagtaagtgctccgtaaatgtcagcatctattattatcatttgtgtttttttttccccttctctgccttcctttctctccctccttggtctgcttcctcctgttgctatcagagcctgcctgcctcatccttgttccagccttgatggtgatgatgattgtggttgctgttgctatttgtttttttggtttgtttgtttgttttgagagggagttttactcttgtcacccaggctggagtgcagtggcgccatctcggctcactgcagactcttcctcttgaagctggggaagttcaagcaattctcctgccttaggctcctgagtggctgggactacaggcatgtgctaccatgcctggctaattctttgtagttttagtagagatggggtttcagcatgttgtccaggctggtcttgaactcctcagctcaaatgatctgcccacctcggcttcccaaagtgttgggattacaggcgtgaaccaccacgcccctcacgcgcagccactgttgctattgatgattattatgacatcattgctcagattcacttggctcagagagggcggagtcagagtgacccaggtggtcactgctccccttcttgtccatcaaatcagctgcctccaacagcattgcctggcagcgtcacgtagtagccctctccctcacaaggcttttgaggcagacaaatgccactgataaagcaaaagcaaatgttttgggtgaattccccatagctacactagatttgaggctgagaaatggaatgcctgtcattgttgactgaaaaatacagctctcctaatagagtcttggtgcaggagctgttagccttgccgccctgcagacttgaagaattgcgacgtcggcctaacataattttggtaactttgtctgcttctgcctcgggtagaaataattcagatttcactctccattttctttaatgggctaaacagccactttgtaatacctgtattttattagacataattctggatattgtttctgcagcgtttttgaaaagacaaacctgagagagcccagctatttaacttaagcaattttaaagttatttgtaaaatgatatgctgtcttttttgacccagttactttataaagctacattctttggcaaacattaacacaacttctccgtgtgtgggctaaataaatattcgggcaacactgattgagcactgccttgggtaaataattctctctccacacatttcctagtttataatgaggagttttcttcgtggtctgaccaaatgtaacattccattgaaaatgagacataaatccttgagtgagggagacgtggaaccagggtttgaggagggttattaaaaaggtgagggtagcagggtgacctcctgagtcccctgctctcccgagccttctctcctctctggaacccatggctaataggggacaggagagagcggaagcagaaagaataagagatatgaaagccagccgggcacagtggctcacgcctgtaatcctagcactttgggaggccgaggcaggcagatcacttgaggtcaggagttcgagaccagcctggccaacatggtgaaaccctatctctactaaaaataacaaaattagctgggtatggtggtgtgcgcctgtaattccagctacttgggaggctgaggcatgagaattgcttgaacctgggaggtggaggttgcagtgaactgagatcgcaccactgcactccagcctgggcaacagagggagactgtctcaaaaaaaaccaaaaacaaaaaaagagacatgtgagccttcccttccctctccccatcctagcctcctctcacccaggtccattcttccactgtcatcccatgatgctctcttgcattttaaagtttggaagcccttattcctttgttttgtttttgaaatacaaatatcaacatttttattgttctatagtaatacacgtttcttctatagtacattaaatcacaagaggtaatagtgtatctactaacacctatacttttgagtagtgttgagtgtaaatgatattttgaaatatctgcagtaactgatgtgatatgcaaacatctgtgatttcttttaatttttattaattttcattttttaaaaaactttagtttctggggtactcgtgcagggctgttaaataggtaaatgacatgtcatgggggtttggtatacagattcttttgtcacccaggtcagaagcatggtacccaataggtgctttttcggtcctctccctccttccaccctctaccctccagtaggccccagtgtctattgtttccttctttttttgagacagagtctcactctgtcttccaggctggaatgcagtggcaccatcttggctcactgcaacctccacctcctgggttcaagcgattcttgtgcctcagcctccggagtagctgggactacaggtgtgcaccaccatgcccggctaagttttgtattttgcgtagaggcagtgtttctccatgttggccaggctggtcacgaactcctgacctcgagtgatctgcctgcctcggcctcccaaggtgctgagatcacaggcgtgagccaccgcacctggcctattgttcccttctttatgtgcatgtgtactcaatgctcagtttccacttacaaatgagaacatgtggtagttggttttctcttcccgcattaattcatttaagataatgaagctcctgtccttgacccaatctccactctaccgtttgatgtccagtgtggactgcccctctgaaagcccttcactgcggcttagcctgtggtggaaggtgtccaaggtggctggaacacctcctgctgggggtgtcagtcttggctctcctgttttctgcctgtgcaatggtgggtaggtcccttgatacctcgtaacctcagcatccctgtgggtgataaggagatgataatagtctcttcccgatgggggttaaataaaataattctcggagtatgtgaagcagtacatgtgaagtgctcagctttgtgtctggcacataaggaagtggtcagtgtttaatgttagggatcatagatgctgataaattgccgtttatggcatatttcatgtattgcctcatttaaacctccttgcaatctgtatgactcctgctgatgatggggaatttgagactgtgagaggcttggcaaaagatctaagctgtgaagtatctggaataggattccaccttcagccctgccttaatgaagaccatggtcttgccacattgcatctccccaagatttttatggttctatttttagtcacgttggcctgcgttggtaaatttacctttcctggtccttttgagtaactatctctggaaaggattaagtgcagtgatcaatcagcagcaaagtcctggaagaaacccatttgttagtctctgggcctccccaggccttatcagggcttagccttcgagcagtagcaacacttgcacctgcagttactaattcctgtggaatgaagtaggcgggcccgaaatgtacagcccttatccagtgaattctcataggagcaaaaaaaagtgttttctttcccccttggagttctgtttcttcttaaaattagctatttctcatacacaatagggacatattcataaaaaagggaaaatactccaaagttgaaaaaaagattgaaaaagaaaatcctccaatatatatctactcttagcattttggcacatattcttacagtagtttcaaatgcccaggccattttgttttattttgttttgttacaattgtggcatatgtactcgtgatggatttgcttgttatctctaaattaattctcctcctgcaattcaaatattccagagatatgtatatttttaacacattgttaattatcccatatggataatagtttcttttctctcttaacattttaaaagcatgcctccaggttgttctagacggtcctgaacagtgctttgaatggggacatgttagtaaaccaatgagaggaaccacggtttagttcatcattctccttctaactgtatttttaggttgtcactaactcttttcagtcgtcatttccatggccacgaacatctttggttctaaagcatttttcccatttaaaattatttctatgggattgatttgccagaagtagaatttctaggtcaaaggtacaaacgcttgagaagtcctgatacatattaacttgggccagaaatctaccatgtaattgagagcaccttgagcttggcttcagagccaggatgaggacaggaataagtgggccttttgatttgaaatgttgagatacgaatgtattctagatgggccaaataaccagcttattttattttaaagtcgagtgaattttctgcctcactaatgtgcatgtcttcaaagacaagtagtgggaacggagtggggatttgtcatcccatagaatgccaccacatggaatcggtcctgaggcttctgaaagcagttccaaatttgaatgtttcctaagttagttcttgcggtacagcgcagacaatattcttcctcgacaatagctgagacccaagtgcctgggcgcttccaggtcataattaacctcttcaaaataagagcaaagaaaggcaggaaaaggtcctctccattccagaaaggagaacaaagagggggaattctaaccctcttgccacctctgttctcgtccgttccatattaagaagcattcaaagactaggatgccattttgcaaacgtctcattctccctgaatggtaaggctccacgctttagcacaagtggtacaaatctgccttccctcattcttttttgcagatcatcccgctccccacccctttctttatcatggctcatttggagcatctgtgcattttttaaaggctggattttctttctgttgccattgaaacattgcatttgtacaggagaactacttaatggcacagtttgttattacatggaattaaatacaacctatttaaatcatgtaccgtgaaaccaaagagctgtgtatggaaaaagcctcatataacccagtttgccaggtcctaactcccttcatacatatactaacatgcaaaagacctcctaccttttttttccccttctgtttctctcttggtataacactaccctgtttttgaaagtacttgtactgctaatatattctttaaagaagaggggggaaacctgttggtcccctcataaaacagttaacaggaagcccaaggcatctttcagtgccatttttggctgatgtttggaatggttccatcaatcactgctgttcatgtatagctggtttttatgtcagttaaaccatcttccatcaagttggtgaagcagagtcagggaacaagatgaatagcaaaacgtcttctgtggcatggaaaaggctttgcttttaaatgcccgtgttgatttcttaatattttcaacttcctcttctgaagccagttccccccgaccatcagtcatgagtccgttcttttaaccttgttcaggtggcgtggggcggtgtgtttggtggggagtgatgggtgcttgcctggaagtgcgagcaattgatcagctgatgaggggtatttattatctgtccctgactcccgagagaggaaataaatccttggaccccagagtgattttcggagccacaagaatgcaagatgtcctgtttccagtcagaccatagcagtatcagtctgtgcagttggaatcttgcatggggaggtgtttttatttcacacaagaaagaatggcacatctttccttgaaagatgtattttgtatatcttaatgtcagttatgtttacgtgtttgctgctcagaaatcaacaggatttctgcccttccccagccccctttttttcagcccttcagagaatatttgttgagtgcagtgtgtaaaatcatggcggtgccaagagggggtgtgatgggtgtggccgcccccctgccagcaggaggaatctgttttcactgacattgtttggaatcaccaagcatggtgatgataaaaagcagttaaactttggtcacttttattaatacttttaagtccttagcgaacaatgcacccgttattacttgcacctagtggacatggttctcattgctgctgcccacctttcttttttttgccatgggtgcaaaagatgcctctggggatcccagaggactcagcattggtaaggatgcagtcctaatcctgaaggagggtacagctgaccagggaggtaacacatgaatgcagctgatagggccagttggacccagatttcaactgcaatctctatttccttcggatctgttgcatctgctcaaacactagttctgcaatttcccaacacctgccccctgccccttataaaagctcatggttccatgtgactttccactcctgcgtctctggccttggggcaggtcagtccgtggatcacctcactgtcctagggatgctcttctggtccacactgtgcctaccttggatatggagttccacttgttcccttacctttcacccacctgtgctcctcacccaagcaggcattgatggaggtctcatactttactgaagatgtgaggaaagaggacacttatgtagaacccaactgcaggtggagccttggcgatccatagccctctgtaaagtggggattgaagcacatatcttgcaaggcttgggcattgattgcagggagtaatgtgtatatgaatcatcagctatgcaacataatgctgatgctaagtactaacattgatggagtgttggcatgagctgggcagagtgctccatcctctatgtgtgtattagttcattcttgcactgctataaagaaatacctgagactgggtaatttatttaaaagacacctttaattggctcacagttccacaggctgtacaggaagcatgatgctagcatctgcttggcttctggggaggcctcaggaaacttacaatcatggtggaaggcaaaggggaaggaaagcatctcacatggtgcaaacaggagcaagagagggagcaagggggcaggtgcaaaacacttttcaacaaccagatctcaggagagccaactcaccacacagcatacgtgctaaaccatgcatgagaaatctgtccgcatgatctaatcaccttccaccaggccccacctccaacgttagggattacatttggacatgaaggctgggtgcggtggcacactctgtaatcccagcactttgggaggccgaggcaggtggattgcttgagctcagtcgtttgagaccatcctgcacaatacggtgaaaactcatctctactaaaatacaaaaatgtagccaggcgtggcggcacatacctgtagtcacagctactcaggaggctgaggcaggagaattgcttgaacccgggaggtggaggttgcagtgaggtgagatcgcaccactgtactccagcctgtgtaacagagcgagaccccatttcaaaaaataaataaataaatttgacacgaaatttggtggggacacagattcaaaccatatcaatgtgaattaaatgacatcattcagtcctcaggacaaccctctgaggaagtacttatgccccccggcctttttttttttttttttttttgaggcagagtcttgctccatcaccaggctggcacgatcttggctcactgcaagcttcacctcctgggctcaggtgattctcctgcctcagcctccggagcagctgggactacaggcacgtgccaccatgcccagctaatttttttgtacttttagtagagatggagtttcaccaggccagactggtcttgatctcctgaccttgtgatcctcccacctcgacctcccaaagtgctgagattacaggcgtgagccaccgtgtctggcgtcatgccccgttttatagatgacaaggcatggaatggttaaatgtctttcccaagctcatggagtggtggcggtggaggtgttgtgaatgtgaacccaggaagtccgcctccagagctgcaggcattaatgcaaagctgcactgcctcacgaggtcgctgatgcactctcattccttttcctccagggactcctgcactttgccaggcgtgggccagaatgccactcgtattgtttatcttaatgcttagtgatagtagctacctccagtgcacgccgcattagcctctccaatgagtttctcctttattttaaatgtaaatctagagttcccttaatccccttaatttttagtacgtggctctgagggcagaaacattttcaggagcagcctgggctgagtttttaatgtggcagcagcctcggctggtttcagcatgcaggtgagaaggccgttcatctggaacttgggctacccaacagtgcaagtggggagatcagagcatggaaaatgtttttgtataaacttaggtggaccaaaatgatcatttcaacaacatttcggacttgattttttgtatttatatggcccctttcttcccaagaattgaaagcctcaaactagaacgtggcttttgaacggtgaacattccacaaacatttaatacagagatggctgtggggtgggggctgggggctgggggcctggaaggggagaaggggcaccagaaggagaaatgggaggaaagggcgagtgagatagcaaagagaactcagaaagtaataaagccctgcagtaatcagagggctgaggccaggtccccagtgagcggctgaacacacagtgattcaaacccactccagacctgtgttcttaatcattaccttcacctggagggacagacctggccttgggcaagccacccccactccctggctctgtgaccttggcagctgactggccctctccaagatcagtttcctcatttgtgtaacagtagtaatctccaatttagggggctgtatggatattaaatgagaaaacacacacagatcatttctttagcacaacgtctatctggcacattagcgagagctccggaaatacccatgccagggtcacaagctcggttctggagctggatggccggggtttgattcttaactctgctcctttctagctgtgtaactttaggcaaataatgtaacctccatctgcctttgttttttcctctgtaatagaaggaacaacaacgaacaacattttttttttggcaagattaagtgagatcttccatttgacatgcctggctaattggcagtgcccaacagatagaaactattggtattgtaaggactgcttattgggtacatatgctgtgccatgggaggtggaggtgctgtcatgctgaacccctattaacctcaataggaaaggcaccaggttcaagagctgaagaagacactcagagccaacagatagacatggggttttattaggaggttacatataggggagagagtccagtgatggcgggctggatagtacaactgcccaccttacatacagaaatggtccagtggcagtaggctggacaggatatccacctccctacagtccagtggtggcggtgggctgggcaggaaaaccataaccacctgcaaatgtcatgtggtttatatcacaccttcacttaacaccctccccctaacaacctctacctggcaatcttcatttaactccaaactcaggacctcaatcccctgtttggcctgtgttccacgggacaggcatggggcacagatgtctgttatatataagggacaaatctctgggttggtcactcctggattccccagcccggaccacacattcaggtgcatctcccacacaggatcattctaagggtatgcttacgttaccgctattggggtgtgttcaccctgcaggtgcagagatggcaaccgaggcagctgaggatcagggagtggaataacttgcctagttctggctcttcccatctaatgtggctgcactagatgctgttaggaggaggaggaagcctacttttgttttttacccagtttctgttcaaaggtcgtatttcatggtgcctcatcacagtatgttcttatatgccctggcaaacagaaggtgctcaataaatgctagttcatctggtcccttaatgaatactctggcttcgtcatcttccctaggctttggttaatttggtgccctcttttgccatttctgcaacccttattcattgctgtcaactgctcgttacacagcattgcctgtttcactctgtacaggtgccaggcgtctctcagcttctcctctctttcccatccaactgagcagcaccaataaatagataagaaacctgaaggtctacatcaaatcagcttctattgctgcaaaactcttctagctaacttcattctaaaagctgtctgaaatatatttacttacacccgagaagattcaaaaacattaccgctgaaccccgatgctttgggaacacatggtgtccttggccacttccttgcttgttaccttgtccaacagctgattggcatagtacagatgtagacatcaagtaattctatcgttaaaggattagtcagcctctccctactccccacccacttatctcagtaaggtttagtcaagaagttggaaattaatggggaaggaaggttttgggttatgtgtggatttcatttatccatgctatctcttccctccattagcatggttaattaagagttgtcaatacatctttgttggagtatttgattattttttcaacagggaagattagaatgaagtcttcagatctggcaagtgtcatgggacttgtaaagtaaattgcaggttaagccctcattttgatctctgggatgagagcaagcaccgtttcattgacatgtcatcagctatgatctgagggagcacacagaggtgccctttggggaaagaggggcatcttgcacttgtctcccacattgaaagggtttattgcacagtgagtgtgtgcaagtgaacaaatagcagatgggttagaatggacagaagctagctctgagcacctcctgatttatgctttatttaaaaaaaatcatatgtatgtatatgtgcatacacatacattgttttgtatatatttgtcagatggaggtgtgtgtaaacaaataacagaaatgagttaaaattgacaagttagcttggtaaacatcttgatttataatttattaaaaactacgtgggtatgtatatacatacagacacacacacttcttcaccacctgaacaaaaatcccttttgaatcatccttcttgccttccaaacaagtacactagcaaacacttttcccagatggcaaatgactatgcccgttaggcatttcttttagcatttgtgttgacaatggcctttatttttccttctacttaagggctctcacgttctagaatacatcttaccagcgattaattatgccttgagattgccaggagacgtagacgagcttttattgttttagccactgaatatacctctagataacacaatacatatttacagtgacaagctttgtattatttataggattatagcaaatcatcaaaaaacaacccaaaaagggccacttagaccaacatccttatttctccctcggcttcagcattgaattatgcatgcattacaaatggcaataaggagtaaaggtcggtttagaacaacacagattgcaaaattacaccatttgtttaaacaacattcattattgattattcagcataggggctgatagaaacgcaaacagtggcagtaatatcatctatttacgtaggccctttataaatgtgggaccataccctctgtttagatcggaacaattgttcaaattttccagctctgttttgcaagaaagtaaagatgaatttggcatctacttccttgtgtcttttaatttttgaaagatttttggtattctccctatatcactgaagagagggaattggggttcagatggattaagtaatttacttaaggtcctgcttctaaagttataagtactctttccatcatataacacttagcatgtctgaagccagtaatttattaataatagtaatgataataattataaccatatctaatacatattaactcttattttaccagtccatgcacaaagtgttttgcatgtgcttcgactttcagcctttacagaaaccctgtgaatagacattattatgatgttcgctttatagctgaaactgaggtgcaaaggagttaggtaccctgctcaagatcactgggttagtaagtggcagaactggatgatggaagtcatcactgtgttccagtatctgcagaagtgtcacacttttgtgctttgaccgtcttctcatgacccatgaatgccatgatttcacaaacctgttcaaacagtattggtttaatggttgattcaaatgggtgttccaaagatatcgtaaatatatttaggatattagaaataagatatttaactttactaacataaaccttcaatttagttttaaagagtcttagagcagcataaacaacatgactttcaactaaaatggaatttactaaataaaacccaagagattaattgtaggagctatgtcctggtgacttgggaaagaaaaatgtaaggtggtaagcttacgtacatgctttcggcatacacttcccacctccagcctcgcattcccctggtacaactcaacaggcatttcattttgccttacaaattgagtgcaaccgggaagctcatcgcatagctgcttactcagaaaatctggtgtagtggcttagctagcataacttttgagaggtctctgtgtgatggtcttttttaatgtctttcgtgaagaattcttcttttttttttctgagacaatgagttgttctgtcactcaggctagagtgcagtggcgtgatcatggctcactgcagtcttaacctcccaggctcaagcgatcctcctgcctggtaggtgggactacaggtattcaccaccaagctcggctaaattttttttgaaactatttgtagagattggtggcagggttggagggcaggtctcattatgttgccagggctagtctcgaactcctgggctcaagcaatcctcccacctcggcctcccaaaatgttgggattacaggtgtgagccaccacacccagctgaattcttctcttgatcattaatccccaccccaccccaccccagaaaatccatgttatctttttgcttagaggttcaccacctctgttccatcacttttctttttcttttctttcttgtttttttttttttttttgtttgacacagggcctcactctgtggcccaggctagtatgcaatggagcaatctcagctcactgcaacctctacctcccaggctcaagtgatcctcccacctcagcctcccaagtagctgggaccacagcctcctgagcacccgggtgcatgccactgccaccatgcctggctaatttttatattttttggtagagatggggtttcactctgttgcccaggctggtctcgaactcgcaagttcaagcgatctgcctgcctcatcttcccaaagtgctcggattacaggtgtgaaccaccacatctggccaacttccctttctaagagccctcttggggctctgatatgcacctctcatacctcagccccagtcagggttgttgaaaacccactgtctgcccagaggctgggagcacatcttggtctgcctggtatggagggctgggaggaggattgcaggaactgcttaagaggcctcactttgcaagagcagttcaggatgtgtttccagcacagtttccaacatgtgccacccatggcttcccctttcatgttcctggcctttatgctaagttctcacattgttatttttacaagtcttttccaaggcctctgattttctagaccatttaatgtttgccataacccataagggtataactgtcttggcacattcagatcccccgtccccctgctgtccttctagtcagtttctggcacactatgtttatgagcttacagaacagctcctaggttttcttacttccaaaacagtgggcaagaacagctaccttttagaagcaggaaaaaggaacataatgaataaacctaaaggatttaaaaacttggaagacactaagaaactatattgccgagaaagagaaatgtaaattccgctggataaattagcgtttgcggttacttctctctttgttgcttaagcagaggagaaacagaagtcatagcaaagagagaggtagctgcaaaagctaatttatccaaaagaatttacatttttctctcttggcactatagggggcatgtttactctcctgatgtcttttggggaaggcgaggcacaaaagaagggcatcttcttccttcacacacacaccccacttaggaaaatacgtacacttgagatgccagagacacacccaagtagaacacatcccaagaacagtcaataataataatacccatcatttattgaacatccacaatagccagacatttttctagttcttataaatccatgtactcctcccagtagctttatgaggtcttattattctcattttattgatgaagaacttaaagttcaaagaaaggagtaaatcacgaccaggcacagtggctcgcgcctgtaatctcataatctcagcactttgagaggctgaggtaggtggatcacaaggtaaggggtttgagaccagcctggccaacatggtgaaaccccatctctattaaaaatacataaattagtcgggcatggtggcatgtgcctgtagtcccagctgctcaggaggctgaggcaggagaatcactcgaacccgggaggcagaggttgcagtgagcctagactgcaccattgtactccatcctgggcgacagagcaagactccatctcaaaaaaaaaaaaaaaaaaaaaaaaagtaactcattcaaggctacacatttactccatgaagtgagcacacttcagacttccagtcttgtgtggcctgtctaccacaccatgagacttcatgtctctcctaaatgaggagaaccaaagctggaaattgtcaccccctgtcagcccacagcactggtttctaaacctactggcctctaccgcttcacttctcactgtaatctctctgaccctaccttccagcttctcttgagaacttgactcttaaattcattggtgagaaaggaaatttttgctccaataaactgggtagctcagtccaggagagaaatgtactggactcagacttggaggacagagctttgtgaccctcctaggcaatgtaatgaccctctcctggcctcaattaactgaggccaggagagggtcattagcaaactgtcctttgctaaatgggactaatgggaagaatagtgtctgccaaataaggtggttgaaggattggatgagactgacatttcatttgcatttagtgaatacttgttgaatgactgaatgaatggttgatgtacagaaacatgaacagagagtagagcagaacattggtgaatggtagtagattgcctcagacgcccccctttagaatcacacaagctgtcatctgtgattgcatacctgtagaagtctctatcatttcgtagtctatgtaaatgttgaccaactgagttgttcagtgtacagactgaacaaccatacagggaatccctaatctcctgcactgtgagtcaaagagtcagacaggtctagatgcatttgcttcaggtgaggccaaggcagtctactcttaatggcacattaggctttggacttgaggccgtgtcttttacatttcgcagcaatcagaaggaatggggtcgccccatgaacttcttaaccacatacaggctcgtggcgtggggtcttcatctggctactagattgtttaaagaaggatttttgtgattcttctaggctgacacattgcctgtcatctgttgtttttctaatcttctagtaaacatttggaaagtgaaggtttaggcatgtatgtttctcttatgtaggaaggggaaataaggccatgagattgcatgagttttctttccaagtttgtgcagatctgcacaatgattgaaatatttgcaacctgtagagcagcagggtatttatttggcagcaaacagtattgatggattcggggaatgccatttgacagttacaggctcccgtgaggcggtgcaggctcctccgagccagggatggagctggggattgagtgacacaagactctttgggtatgtctcaaacaatataaatcaccagcaaaatctcactcctacaaggagaacctgcagggagctccgtgggaggcactgctgtttactctcctcattccccactgcaaccacgcaattaaaaccaaggaatggaatctgatgtctaccgcagcggttttttccatctccattccttctgcattgggaggcttaaaaaaaagaaaaattagatcccagattctttattcttttggaaggatttgaaacgattatcactcatgctctgctgctttgaatggaaaagtgatttgataactttcaaaactcttagccttctaagacttagattctggtactatctcatttatgtgacgtgggacaaatagccactctcttgcataggattttcttttctttctagaaacaggaactgagtatgtttccaatatttttttatttctcctaaaaaaatcagagactatatatataaaatctcacaaactttgtttcccagaaaaacaactatatttaaatgcagctcatactgtatgtaagtatgatgtaggaaaatctgttaattgtgtgacaattatgacttctgagctgctcatttattaaaatattctccctataattaaaaatattttatttcggagacatggctccattaattgcacatttcctaatgaagtttgaaggaagatttaaaaatcatattagccacttgtacaaaaacaaaccagtcatatcatagcattaataacaaaaaaattccactgtttatttaacgtaccagcaaattctaccgtatattgtttgctctccgtttggtgggactaaaaagggatttaaaaataggctatatacactgaatgtagtttcactggaagatttaatgccaacatgttcttttttggtattaacatattgcattggtgtgaaaactaaaatgccttcagcgatgatcttttcctttggaaaactagattcccactcggatgctacgaggggtaatctgtgctaagtttatggtgtgtctgccagggctctgctttaaaaaacaaaacaaacccttttggaggccttgacagttccatggaattcctaggaacagcctagaaggtgaatgatgcagcccagttgtttttattctgagtttggcaaaaatgatagagaagaaaatgtacttttatgtgttcgttcgacagttaaagagtattccagattcctccctccaaaaaaaaaaaaaaaaaaaaaaaaaagggcatattccctagccaaggcccacatggcttttctttactttaagtactcctcatattatcttgaccttaaagtttacagggtaaaagaaacatttatggaacagttaagaccagttagaacataacgacttgcctcattatcacactccacaaatctccactttacagagttcacttccctgcctgctttaaacatgtgtttggcctgcaaacagtgttactagtgctcgcatatggaaacagagaacttctcattccttacctcagacgtgccaaaaataagaatctttaagaactcataaagtaatttagcaccacgttaataaaagaagcaccattttgaattagttctgtaagtatgtgtttgagttagaaatagagttttaaaaaactgtctgttcatatagttcatctgcttaataagtaagcagctctttcaaatcaccaagctcaaataaaacaaacaaataatgggacaattggcaaaactctaaaaagtgatacaaaagaccaagggatatttgaaaaatgtttaaagttattagcagagaagacacaatttagaagagagactgtattccattttatttttatttatatttatttttgagacagagtcttgctctgtcacccaggttggagtgcagtggcacaatctcggctgactgcaacctctgcctcccgggttcaagcaattctcctgcctcagtctgccgactagctgggactacaggcacacgccactatgcccagctaatttttgtagagatggagtttcaccatgttggccaggctggttttgaactcctgggctcaagtgatccacccaccttggcttcccaaagtgctgggattacaggcatgagccaccatgttcgaccccatttttataaatgtaaaattaacttaggtttaaactattaatacacaaggttgagaagtatagaagtgggcattctaatatactgtggatgggaagaacaattgattttcatagttctgagatataatttggagatctctatcaaaagttttataaactttttttttacctaggaatttcatatctagaaaaatattgtaaaggaatatttaaagatatatccacaaatttatgtacagtgatgtttatgcttatattatttatagacttttaaaaaacttaaaatatttaacaattgagttattttatgatgatctaaactgcataggataaaatcctatgcagtttacagaaatgtaaactaagtgcttcgttaaatgaatcctagatcccgtgccttctgactgggtgagacctcccagcaggcgttgccagagaacttacacaggagcgtttctgctggaatcagctcgatgcctcttgaggacagagactcccagaggaaggagcaggcagccatccttgctgtgctgcagcctccacaggtgacacctcctggtgtgggagggacccaggtgaacagggtctggagtagacccccagcaaactacagcagtgttactgggaagaggggcctgattgttaaaagagaaacaaacagaaaacaacaacatcactaacaaacaagttcccacaaagaccccatccaaaggtcagcagcctgaaagatcgaagccagataaattcacaaaaatgtaaggctcatttacattacaggctcaggcctgtaatcccagcactttgggaggccaaggcgggcagatcacttgaggccaggagtttgagaccagcctggccaacatggtaaaaccctgtctccactaaaaatacaaaagaaattagctgggcatggtggcaggtgcctgtaatcccacctacttgggaggctgaggcaggagaatcacttgaacctgggaggtggaggttgcagtgagccgagattgcaccactgcactccagcctgggtgacaaagctatactccatctaaaaaaaaaaattagttatctctgccctttgggaggctgaggcaggtggatcacttgaggtcaggagtttgaacctagcctgggcaacatggtgaaaccccgtctgtaccaaacatacaaaaattagctgggtgtggtggcgtgcctgtaatcccagctattggggaggctgaggcaggagaatcactcgaacccgggaggtggaggttgcagtgagccgagatcacaccactgcactccagcttgggaaacagagtaagactccatctcaaaaaaaaaaaaaaaaaaaagttattgattaaaatttaaatataaattacaagtaataatgaaagtatgaaatttttattgattcataaatatttggttttaatcaaatatgatgtgaagctttaagtgaaattattgatattcgaagtttttttttgaatgtttaaatcatttcacattcacattttttaagtaaaatgaaacaacttgacattttagcatagaatgtttatatggtggccaaaaaagcagattggtatcatgctttatgtgtgttcattctagtcctgcacgtgtagaaatgtaagattttaatgtgtggtaaggtagatagatagatagatagatacatacatacatacatacatacatacatataaaattaggtaagaggatacttttaatgtatggtaagctatgattgcaccactgcattctagcctaggcgacagagcaagaccctgtctctaaaaataaataaataaataaataaataaatattttgtaaaaggtatcatagctgtataaaaagaaaagactaaaaagaaagccactcaaattccatttctcttctgcagatttttttttagttttgtatttcatctgtgattgactgtgtatgtatttttgcatatatacctgcaagcatttgtccttttaaccttaggaaaaaaagtctgattgcaactacgtgtttgggaatcagggagactatggaagaacaatctcagatctcagcttgaggctccacttgcaatatcacaatttctaaaacatgttgtatgtgggcccatttgccatgtgtgtgtgtgtgtctgtctatctatctatctatgtatctatctatctatctatatatatatatatatatatatatatatacttataatgtggtgggttctcgaatcacagttgtaattcacatttttctccaccaattctgataacttgcattaagaaattgactgtgtaagttaaattttagatcaataatgcaaattgcaagacctagtacaggccaaggcctcattatatctgagtagggctttaagaaagcaagaaagaatcgcttgaacctgggaagcggaggttgcagtgagttgagagcatgccattgcgctctgctccagcctgggcaaaaagagtgaatgaaactctgtcaaaaaaaaaaaaaaaaaaaaaagaaggaaagagggaaatatacatcctcctatccagggtgaattacaaatagtaccagttggttgtaagtggatttaaaattactttttactgctaatggggcatctgtcttcattcaacaaatatatttcggtctctgttagatacagtgtatctctgttagatagagagcattctgttagatacagagaatctctggtagatataaagtattctgctattctgatcttcctgttagaagatcagatttacagaagtctacatttgctctcaagggaccttcagtctgtttggagcaatctctttattaatttatttattcagtaaattttattcagaaccagctatatggcaaaccctagtccttatgctgaggtttcagagatgataatgggggcagatgcagccattcagttgacttcctgtggacaccagagatgacaggcccctgtccccagcttaccatccagcatataaggcatatatgcccctttccatgaagtataatctaatgagaacagttggagaaggtcaggcaaaggggacaggacaggaactcaggaggaggggatatttagacttacagacctgccctacctaaggtcccacagatggtctgtgatgacagatagcccctggactgctaagactcggatctttaaatataggcccatctgggctgtggggaggtgacagcctgagaaaaagtcattcttagatgcccttactctgttgatcataaaagtaggagctgaaattctcatagcctgagaagctatttgcagcattccctgagggctttgaaacactatcaaacaacaaggagagacaaaacagtttttagccctgctcaactctcatgggcttgccttattttttcagggcatgctctgtctccatcccttggctctgctttccttacattggtcttcttgggcatccgtcttccattccacagtgtagcaagccagaagctgggggaaacatggtgcgtgcctgtaatctcagctactcgagaggctgaggcaggagaatcacttgaacccaggagatggaggttgcagtgagccaagattgcacctctgcacttcagagcgagacttcctctcaaagaaataaatacactgtgtcctctcagcaagaccaggacaacagtgattctctttcctcaaagttccaatcagtgcccagggcttcatgcatattggacagacctgagtcatgaggccatctccgattggtccatccagggccatgtgctcaccccttaattcaggatgtggggtccggctcccctgaagtgcacagagaagaggggttgcccaaaggtgaatggggagaaggggatataagtgcaggacaggtaagaacagcaaatgctcattaacaccatgcagtgatgaaacgcctcttaatcaacccttgctggctgcagttgatttgttacttaccgtgaggttatcatagctttgcagagactttgtgatggggctgtcaacagagagaaagagagagagagaaagaaaagaaagaagtgccaccagtccattttgttccactcaaatgtagatcgtaatttttaggtttgtaattactgatgagaagaatgcctgagccagaacttcccagagatttatctgccacttacctggagtaagtagaaaggatatcagttttccccagtacacctgcctccaatgaagccaactctcaggctctagaagtctctgccttgggatggattcaccagtgtgcttctcaggctggccagtgtggaagcagccttgctgtatttcatcctttaaaaatacagcctgcttgccatctcacgacttttcccttaatgcaacaaagaaatatgtgtttggctgtgaaatctttttttttttttttttttgtttttttgctgtggagcgcaaaatgttcatttatctctggatggtttgtttctggccacctgccctaagtgtatctgaatattgtaacggtgatcacttcttgagtcttggtcattacgaagtgacatttggcatgaatttgctcatcaccacagagggccccagggacccacttgggagaaggtgagttatagcccacaagataacatttctcctggtgactgtcctgaaagcctactttgggccaccacatcagtgtgttgggagatgagttaagaggttttattcttatacatgcggaagaattatgccttcttgagccatgctcaggagatgtcagccttttccattgtctccccgcccccaccgccagccctgcttaaattatcccctctttttaaacaaaatatcctaatcttggaagtggcatatcatgttccttcttttttaagagagaaggagaaattcctgcagatcatcagggactgaggctaactgaagctttggaatggatacagtgctactctcagctgaaagcacaaatcacttccatcacgtatatgagattcctcttgcagcactgcagaggggtgataagcaagagttgatcgatgacagaacacccacccaatttcttgactcattcttcaacgggcagggtctatacatgtggtatggctgcaatgtttgttgataacccctacattcacaaaacgggcgcatgggaacttgtttgctgccttctgccatgtgaggacacagcaagaaagcacatacaggaagtagagatggagccctcattagacgccagatctgctggtgccatgatcttggacttcccagcctctagaactgtaagaaatcagtcagtatctttgtttctttcctttctttttctttttctcctttcctttctttttctttttcccctcccctccccttccctcccctcccctcccttcccttccctttctttctttctttctttttttttttttttttcagacagaatctcactccgtcgtccaggttggagtgcagtggcacgatctcagctcactccaacctctgcctgcctggttcaagtgattctccttcttcagcctcccaagttgctgggattacaggtgcatggcaccatgcctagctaatttttgtatttttggtagaaacggggtttcatcatgtaggccaggctggtcttgaactcctgaccctgaggcccaccttggcctcccaaaatgctggaattacaggcataagccacctcacccagccaagaaattaatttctgttgaatgtatgttgttatagcagcctggatggactaagaatcatgatgaaaagttgggttgctttcatatttagaaatatcttggaacgggcaggcgtggtggcacacgcctgtaatcccagcactttgggaggctgaggcaggtggatcatgaggtcaggagttcgagaccagcctgaccaacatggagaaaccccgtctctactaaaaatacaaaattagccgggcatggtggtgcatgcctgtaatcccagctacttgggaggctgaggcaggagaattgcttgagtctgggaggcggaggttgcagtcagctgagattgtgccgttgcactccagcctgggcaacaagagcgaaactccatgtcaaaaaaaaaaaaaaacaacaaaaaacacgaatatctttttttgtcagctccatgagggcacaaagttgtatcagcttttttttttcacagctgtgtcttcatcctaaaatagtttctagcacagaacaggactcagtaagttatttgtcaagtaaatagactccttaataaattgtctatcctgtatccagtacaatgcttggcctaatatacatccagtttcatttaatcctcaaaacacattgatgaagtgggtgttaatccctattttacagatgtgggaattgaggtgtagagctgttgaagaacttgcccagggttgcagagctctttcacaggggcagagcatgggctgaacaccagacctgtctcacactaaaggtgaaacaatttcccctgcatcaaactgtctctgatatgaagggtctacacactgtggtttgaaggtcagatgtggcctgtcatgtttttgtacagcccgagagctaagaatggtttttacatttgtaattgtttgggggaaaaaaccaatagaataatgttttattacatgtaaaaattgtatgaaattcaaatttcagtgttcataactaaattttaaaaacttttattgaaattccagagagatctgaagtagttttattggaacacagccctacacaccttcatttataagctatctgtggctacttttgcactatgccagcaaagttgagtagttgggatggagactatatggcccataaagcctaaaatactctctgctcctttccagaaagcttggcaacccctactatcatctccacgtctgcctttgttcttcttatttgtcccttccctctgaaggcaggatagcatagggtgaccataagactctctggaactagcctgcttgagtctagtcttggctctgtgctgactacctgtagggatgtaggtgagcttttttatttttctcaacctcagattcctcatcaaatggaagaaataatgagtatccactaccttgggttgtatggaatgaaccaagttaacttagctaaactcatcgcttccaacatcgcctcctatgtaataagtgcttgataaatgcaagttctattcttctattctctctctctctctctctctctctctctctctctctgtctccctctctccccctctctctcatagtgatatggtttggctgtgtccccatccaaatctcaacttgaattgcatctcccagaattcccatgtgttgtgggagggacccaaggtgaggtaactgaatcatgggccccagtctttcccatgctattctcatgatagtgaataagtctcacaagatctgatgggtttatcagagggttttgcttttgcttcttcctcattttctcttgccaccagcatgtaagaagtgcctttgcctcctgccatgattctgaggcctcctcagccatgtggaactgtaagtccaattaaatctctttttcttccatgtcttgggtatgtctttttcaacagtgtgaaaatgaactaatacacatagacacatacacacatgtacccacacacacgtaatttttgtatctaagaaaggggagaaatactttttagttgttctttctgcttcatttatgtgtggagtgcttaatgtggtcacacggatattaattgcatgttttcttgttttataattaagaaataaaaatgaatcactctgacttttcgcttcattttctgcatttgcacaatttggatattttattttgtagtctattaaaatgtgaaagtcagtgtaaagtgtcagtagctttcatgagtgttcttaaaggaaggccatctgattggaatgcattgtatctgtccttccctcttgctggggtcagcccaggactcgaggggaatgagcccctgaggaaggctcagtccttggcagcgaaatccaggcatggaaaccaagcctgagacatgagctgcaggacatctgacactgtcttttaagagacctgcctgtgaggtcctcatcctgctccctacactgcttcagatccacttgtccacttgtagtgagggatagtatctgttccacctgattgattgattgattgattgattgattgtgaggcagggtctcactctcattgcccaggctcatctctgcctgccgggttcaagtgattctccttcttcagcctcccaggagtgccatggtgcaatctcaagtcactgcagccttgactttccaggctcaagtgatcctcccacctcagcctcctgagtagctgggactataggtgcgtgcccccacgcctggctaagtttttgtacttttagtagagacagggttttgccatgttgcccaggctcatctcgaaccccttgactcaagcgatctgcctgccttgtcatcccaaagtgctaggattacaggcgtgagccgccgtgtctggcttgctccacgattttcctctatgaattccacctttcccatggtgggaccaaggctggaagtacttcacaaaggctccatttgaaaagtggctacaaataaaagggaaaatatagtattccttaaaaaaaaagtagcattctatttttccccattggtaagtagtacaaatttgagaaagtgtaaatttgaattccttaataatcagatctctgcaatgtgttttgcttttatcatcctgggttgccatcttggccaagtgtagattattctgctcagggtagccatactgagatcctggtgtgcacaggaaaagagctaacctttgtggatgaaattgtagagtcactacctgcatttgctgtagctcttacaattattttatttttggaagacatcgagagcatggtccaaagctgcataggttgcaagtgggtagaggcagaatttctctccaggcctggtggattctaaagctgtttactcttcacccaccatttcctaggtctggtttcttggttaaatacgtggaagagtggatggacagaaagacagattgatcagttctccacaggcttccccaaactggccaggtagaaataagctaagcaaataaatgacttccccattttataattttctgcaagtcacataagccttcatgttgtttatttcttggttttagatttttttaattataaaagaacattattatacattatttgaataattttttaaaattatagagctgtctaaaggaggcattaaaaaaaccctttctattccttcatctaattctatccctctgaggcaaccatgattagtattttgtacttcttgtacatcctccttcatgttaatatagatgtacacatatataagattttgttctcattttctgaaataagtggacacatactccaccatccccaggtagtgtacagtgtgtgccctttcaggctagtatgtacagctttaaatcattcctttacagagctgtgtaatattccacaacccagaggagcagcttgaagccagctaaagtatgtatatccaagtggaattaagagcttcatgcgtagtttcttgattttgattaagaatctttcttaatagatatgtcagacgtgactttatgctgcaagacatagcataggtagaaatttttatgtcacaggtgggcctaattaaccttgattaatgttctgcaaacccggatagactggagactcagaaagggacgcaaaagctagtctggttcccatgttagtccctgctctgtgagcagctgccacacagtcatgctgatggctcctgcagcagccattctggtttgactgtgctcgtgctgccctgtgacatattgtttaacacagtgagttatgacacagggagcgaaatcaagacttcagccaccgatttaacaaactggtgactcggagatcagcagtccggcattgccatcctcatcaaaagctctatctttatctaaaatttattagccaacttcaaacctgtttgccagctcactaatggaagccttttgaatcaatttgctcctctaatttaaacagcatttcaatgtatattgtcgaagcagaaaggagttgcagcttctggccagtagaattaattatttattatccttttcataaatactttccgaggccgacataactgaaaattgctcaggctgtttgaaaacacacacacacagttttccagtggctaatttgaaaaatgtcaccgtattagttttcatttacatctgtcaggaaacatatctatacataaggaagttttttttttttttttttactttcaccaggtatttttttgtggagtatgcatttaattcacatttacaaattggtttctgtttttaactaaagatactttttcagcagaaatgatgtgtatgatgtcatatctaacttttgatctcactggtatttgatgttaagcctcaaaatcatcaaattttttttacggcactgaaaaaaatacataaatctgcttgattggttcatagaaaaagacccctgtgattaaggtaatgctagtttttgcattttctcctagctgtcattggttggacacagtgatcctcgggtctcttgtgttttcacatgtcttgggaacagaagtgctggcagctttggtttcaggccatctttccaaggaacgttgtctagcaaagaaacttgcaaggtacagatagtgtctccctcaggagcagaggacaggatggctttctttccagtataataaagacagtgcctccttccaggacaacggtttggcagatttgcttgataaaggttggggtttctaagcttggggctcctcagccatgactgaaacgtactatgagcacggcatctaccgggctgttccacatcctccctgtgggactaggggccagggcaatgggaatcagtgcagaaataaagctcatgctgtttgctctgccatgagtaacgaagtcctctgtatctgatcctgggtctcctgttttctgctagcttcctcaaaacttggtagctaactcattaacttacaaggaagagggtgaacgtgtagacccttcacagtttgaaaaatcacctgatcaataactgagattatgaaaaggtaggaatgaaccaattatggcccaaaggctaactccagccagtagccttttatttatgacccgttaaaaaaaacaaaaatgaacaaaaaatccaaagaaggctgtgtgccagagacgatacgtggcccgaagatgaaggtacttaactatctggcccttcacagagaaaatgtgtcaaccctttcctgtttgcgttcaggtcaaatagttgcattgaaaggcctcatcttacaaatgaatcaatatttagtggtttgaaaatatgttgtttaatttggggcgattcaatatcaaattaagatttttaggtttatttatcgatctttagaattacatcaacattaagctaattactttaaattgtgtttttaagtaaccaagaatacatctgtggacgctgttctgtgccatcttgagtcacgtttttaaaacaattacctttgatgatttcgtatgttatcccattcacagatggtttttttcgtccacctgagtttcaaatctgttgtagtcctggaaattttgcttaggttgaaggaatgagtgcgtgtatcttgtcaaaggaaatcacaagcccatgtaaactcgctcttgcttccgtcacctcgtgctttgaaacataaccacagtgtgctgaggtttcacattgttacatcctacaagcgtgcttacctgcatcaccttgctgggctgtttcagcattggaatatcactgggaatctcaagttcccaggagccaaccacgagagcttcacagctcagaattttcaagatgtggatgtaggcagggagcctatgtagtaattcaagtaagcatctcttcttcttgttttccttataggatgatagaaggtcagtgcttgttcaccccagtgaggtggagcctctgaggtgggaggttttctctcatccttgagtttatctttacttcctggtcattatgcaagttaatttttctagcagtgaaaacagtcacatgggactctgcccagcgagggcgttgggaggcctggcggagaagcagttgtagcatcgtccagccttctctacctaacaagggaatatgtgaggtagggtaggacattttggtagcagtcacacagcccaaagagcatggtgaatttaattagtctgccacacctgtatggccttacgttttccgggataacttaacaagcattgtgtgcagccaggtcaggcagatggaggttctaatccaggctgcacacctcatcagccaggagactacagataagtcagccaaacttttggagtaacaagtagctcatctgtaaaacgtggatgttccaatttatgtatagccgcataatacattaccccaaaacttagaggcttaaaacaacaaccattttgttttatcttgtgatttctgtaagttggggctcagtggagtgactcttctgccccttgtggtgttgactggggtcagtcagtggtgctatgctggaggatgaattggactggcacttcagctggtccaggatggtcacccatgggtctggcactttcacgaggatgactgggatgcttggctcagctgagggactcttacccagagccctacacatggcctttcctgcatggcagatatagggccatcagatttcttacatggtggctcagggctcccagaggattccaaaagaaagtaacaggaagctgccagtttcttatggcctggcttaggggttggcacagcatgactgctgtggactaagcagttacaaaacccactcagattcaaggggagcagacatacacctcactttcttctggtagaagtgacaaagaatttgcagccatctttattccaccacagcaggtaataatagcatctccctcattacctatagaataactccaaactttctgatgattaagtgagatatcatgtaaagtaccaagcaccttggataggcaatgggaaatgttcacaacgttcccatttttacctataacagcagtagcaataatgctaatagtaatgatactagtaataaaatcaggataatgctgtttttaattcaccacactgtatgccatttgcttaaaatcagaaaggactcatcggtaaggagtagggtggtagtatcattttggtctgcctttcacccccacaagacaacatccttaacagcagctatgttgaaggtttaggagtgcttgtcattagggtctcatttccaaaatctgggacataataatagatggttactgattacagggatttttgtttgtttatttgtttgtttgtttcttcttgataatctctttcattcatcattccttcatttccactcttctaattctgggcattatatctttgtcagagatagagtcttttagctgtttcttcacctcccaaatccttctcaagtctgttctccgcctgctgtgccttcctatagtgtagctccaattgccttcatccttagaagacctttaatgatatcctatgccaaacttcctagcctccacctgtaccctgaattggccctagcctagttgtccaaactttatccccaggtggttgaactttctaagtttccccaagctgatcagtgttttggggtggtatggaactcagaatagatcactttttttattgactaactctgaccataagtatgcttctgtgcgagcctgacctccacggtaccaggcagagaacaacatgtatgcagagaactcattcactcaataaacatttattaaatccaagccatggggatccataggaggaatttagagcagagttgtcgaatggtcagatttgcctttcagaagaccgttctggcagccatgtgagaaaggagggtggggagacctgctgggaaacaactctagtcacccaggcacgaaatgatgagcccttgagcaaaagtgattgcagtgagtacagggaggaagaggaaacattttgatagatacttggtaaaatcaacaagatttggccaacagctctgaaggggatgacaggcgtggtgaatggagaaggaaggacagaaggctagtttgggacttctggcttggacagtgtattgtgtagtggaaccatcgctgaagataggaggagtccttttcagtcatactgaattcatgacgcctgtggggcacccaagtggaagtcatccattggcacctggatttagatctggcactcaggagggatggacaggatagacattgaccagacacaattatattggcatatttggactggagaacccagcatctgacttaaagagtctgcttctcttcaaaattgcttaggtgttttcaaactacaaacaaatacactcccaaaacctcaatagattctcccagtataccctatattttggccaaactggaatcacatcctggtctccccaaacactgcttgctttttgttcctttcttgctcttccttctgattgcaatgaactccccatttccagtccccatcctccaatcccttcatgtccagctcctgctcatcctttgaaacccactggattttaagattccatctgacaagaatgatcactgttccttccagttcttcaagcactttttctgtttttgatgggatttatcacttgaaaatgcatattatagtaatttctgaattcatcctgattctcctactggtttctaaactcttcaggttagaattcctgttggatatccctctggcccgaaattcctgaatgagttaagcaggacacctagaactatgcagaggtaataccttccttgacctgtcccttttctgggtcagtttgcccttcatgatttcggcaggagtgtgtctccttccattctggtgaacacatccaatgttcaatgttgctcatcagggtaagagttctaagtccctatgtcttagagacaggggttatctagctttgtcttctgcattggcttcaggcttcacatccttcctggacatgttcaatgctgctttcgtttcttgggcgagggccctagaatcaccttagacaccttgctctagacatggccccatcgtggtattcccttttgagaagacaaagattttaaaaattctttctcccttaatgcctcatgaatgcccaagcagcacttcatggaagtacactgagtctctactgcttgcagggattaaacataacattctcaacagtggtaagagagcctttcccttctctttggctcgttttcagtttttattaatttcctgtgcttctggttcatgaatcccaagtcatgatgtgaatcagttcagttcagcaagcactgagctcccatgatataacaggtttttttcttttccgagctgtggcccatgcagagtttactgagacttggctcttgcctttatgctttaaggatcctaaagagaagatgtaattataagatctaaaacgtggaggggggtggtgaattcagcctgcaggcatgtgtttgctgcccccacccccacatcctctttttttaaagttcgcataaaaacctggattcttggtttctcttaaaaaactggaaggtctggcacctttgctcccacatttcccgggcgcagcccttgactcaccctgtacggtggccgccccagttggatgatggggcttgtgcccaccgggtcagctcacaccaaccagcccctattaatttatacctggcccgctttccaaattgacattacctggctggtccgtacgcatcccctgcagtaactggctttctggaggtatgtgctgaggatctctttggcttctgcatctcaaaggatgagtgatttagccaggtggagaggttggggcggtatcctgaatgaaagaatagcacagacaaaagtagtgagttgaaaacagaacagcatggcaggctcccagtaatcccatgagtcacgtgttctgcccacatggaatggatggtggagaagggaggagggaggaggttgggccagattaagcagattgtccccattggtccatttttaaatcttccttttggtatttgtcccttaaggcaacactttcagtctcagaaaaaatccagtaaagggcaaaccagtttgggtgaatttctttgtttttgcagcatgtctggtcccaaagtgggacctggagtccttccgacgaggaagtgcagcctcttgtcgaggagtgcactgggaggggaggctggacttctgggctctgctctgcctctaatctgctgcccagcatcagccttagcccagacccccaaacttcctgggcttcattctgctttgcattcatctcaaagttaagccttctggctggcaggggtttctgagacagactgacagtattagcgtgctgcagtttcatgatggcaagaaggaggttaccaaagccgttttcatacaccttaactcatgagtggtagtgagtggccccaggtgggaagcacaggtgatttggagctggctaacctccttcctttggctcttactctcaccagctcttagacttggggtaggttagttagctcctcccagcctcagtttccctgtttgtcaaatggggtcatagagggtgagaatcagagtttatgcagggcatagcactagtgtaatgctgggcagagagtgagcatccagcaagtggttttgacaatgataataattataacccaagcgacacatacaatttaatcaggcactgtgtgtccacagcgatgtcaaggaacaatgcacaaagcagagtttttccagtctcctgatgtttgagccctgcgcgagccccactcttctcccttttctcataactgctgtgagcaacctcaaatccttctggaagtaggttggttatgaattatgaataattaaagaaataaactctggctctgcagctgaaattgggatcgcatggagaaaatagaaagtccagtgtttgtagctgtgatctctcagttgcttgcatgaattgtgctttaagattgtaaaattttagcccattaaaaataaaatctgttgctttccacccacacctggcaatttggtgagggacgggggctaggatatttactgtctgaaagttttagggaggcttttatgaactgggccatctctccttgtccccatttttctttgcatctccgaactctcattaatttttcacaggcttgtgatggatagtttttatttattcacgtctgagattccgttgtgtgaaaaggactcattttataacattacatattcatggcttgggatggatgggataaggaacttattattaatgtgtcactgtgggaaacttactctagttcatttgcgaaccttgttaaattcggtgtggtcagcagacccggtgaagttttggatacattctcttaacagagggcaaagagtttgctgttgcttttccttgattcagtaaaacaagtttaaatcttatttaaatcgtttgaagtagcaatttgaaaggggaggaaaaaaagggggatggcagagattaagtagagagagaagctccgattttcttgttgaatagccgtgtttcctcagcattctgtagatttttggccaggtttgtgtaagggatgaacgactctctataaaatgatgtcaggatcctttctttcctgcccattgccatttctagcattctctccttgagggaagttgcagttttctccctctgtgtattcatccttctgacctgtgctccggattccagggagttctcaatttggagctcataccgacatcacagaattccttgcctgggacaaatagagggaatattaacatagcatcttgtaaatcaaagctgggcagggggtgggggagggcacagtggggaacctggcccaatctgcttcagtgtgagcttggtaagaaggaagcatatgttgcatttagttctctgcaaagacaggcgctgctctctggcagggacagcgtgtagggtttgcatgatttgtggggccgtttcatgtttgcacggtttggcttggcttgggactcggccagtggtcactgcagtttaacagattccccccgggtgtgaaggaaagcgagataaatgcaggaaaaaggatacattttgaaatctggaaattttacataacaggcatcagatttgaagaatgtccaaaatattacgaatcatagcacaacctttgctaacaccgtggaaatttttgaacatggaatttgttaatgctgacttggcccaccatggggttaaaaaaagtgaatttctttttgataaccaaggtgatgatcttatgaagttgatgatggggtgtgaacggtgtgagtgggggacaaagcaatgaaatatcccttaaaatgcatcctctgatgatgtttccataatgccaaacatttgtttctctccaggatctcattggcggtttgctggtattatattgccatttatattggaaaggcaggcagtgcgaaaactgtagtctattaagagtttgtgagtgtgtgtatgtgtatacagtgaaataatatctagtgtaatgtgaagtgacagtcaaaattacagcttttctcttgccgcaagggtacttctctgccaagtatagtaatattgttgtagcagtgttcaaggttgtcagcaattctggcttactctgcagagagccataatagtgtgtggaaggaaggagcttcctgtcaggggaaatactataattttgatatatatttgttggtgccaaactgcaattaaataggaggtgttggaagaaggttttatttaaccagcttgaatttgttaattaattagcaaaaacttatctttggaatgcttcaagaaacagttctatgttgttctcataacttaattttacacaactgtcttttgtttgtatcttacagaaaacaaaataccaccctccgccagaaaagtgcagaataaaaattttccactagcaaaagaaggaaaaaataaaagatcttgaatagtctcatcaattacatcttcttttgtgggtatttcctggtcttttcatgttttgacttctatctcggtgatctgacagacatgtacgatttgcaacaacatctattatatgatttaatttatacctttatcagtttgcagttatgctttacgactcttcaggtgactaaagaaaaagagggtgttttaaagtgtgtgtgtttgtgtgtgcgtgtacgtgtatacatgtgtttttctgtgtacataagtgtgtgtgttttaaattgtttgaaaaacactagtccatctctattgtattatctgagggatgctagctcgttacttgggatagtaacaagtttcttggtgacaactcctcctcccattgtcaaggaagactgaggatgtcaccagagttcgctgtcaatggctattcagatgaaaaataccttctttttgaataagtagaaaaaccatgggggattgaaatagcaataatatattaaaagctccaaggcagttatgtgtgaagaaataaagaacagaacagagagattgtgttgttttaaaaagggctatttaagagtcttgaaaagagtgtgtgtgtgtagggggacacctccctctcatattaagtattttgcaaattaaatgagtttcattctcctataaaatatgagtctaatcacattttatatgattgtaaaatgtgtctacttttgtctctatctttcatggaaaaaagaaatattcccaaagtatattataaaaaataattaataagcaacttttcatcattattttctgaggttaattattaccctaagaaatcaatttcaatttcttcagtttgaaagactcatttgtgatggggtgtttccaaaaagagagttagttaaatgctatatggaagccttcattccctaaagaaaatgcctctgctgctggcagtgatttatccagagctgtctcacccatttatgccccatgccaggagaatgtatggaaaatgtaatagagctattagaatccagtgtagtagattggtaatagtaaggaacaacagttgtcttcacattgttaaaataaaagtgagataccctttaatcttcgcaaagggaaataactcttctgctaaccctcctgcccaacctgagatgaagtatcaggggatgcagtatggatgtattttcctgacgattggtccttctgtcctgggacccaggtgtgagtgcatagggaaaagggaggagaaatttaatcctgtaactatctccttatggaaaacaggaaaccacagatgaatcaaatgaatccgtttcccctctttctgatcctctgcaaaagtcatcaaaatcactctgttctcaccaggcaactggagtttcgtcagctgagtctagagtgttccaggcagttacagctaatcatggcaggctctacccaactgggggaacaatttagctgttgtgggatttccctttaaattaaatatgttcttcaggtacagttttttaaaaccagtttttctcccccacttttaacctactttatcgtccattgctgggcctagaattgcatgtccattggcatggctgacgttatatataaatatttggaattgtagttgtaatgatagatattatatatatttcacatgttttaagattaacatattaacagtttgtgatattcaacaaagaatgcaataacttctgcgaaacaggtaagagaaacaaccagtcacttgatctggatattgagacgttacctgtaggatatgtattaggctgttcttgcactgctgtaaagaaatgcttgagactgggtaatttataagaaaagaggtttaattggctcacagttttgtaagtggtacaggaagcatagcggcttctgcttctggggaggcctcaggaaacttacaatcatggcagaaggcaaagagagagcagcaggtgacatggtgacagtgggaagtgacagagcgtggggtgggggtgggaggtgccccacttttaacccttttcctgtttaggaaaaaaaaagcgcagctcactgccagcgctcatttaattttacataaacatgctctttgaagctgaagcaaatgtgaccgattttcaaagtgataataaaatataaaaacagttcttggaaatatttctgaacagaactaacatcagaatcatctgaatcatcagaattgtgtattttggaaaaatcggattcatcaaatgaatcttcagccaacaactgttcgagaattatgttaacatcacatgcaggaatgctacattttctcggatttgacattttcagtgatggagaactattatattttgtaaatggaaataccactactaaaaacagaaggctataaatagaacgatatccttcgtttccaaagtcgatatgctagagtgatgtgaaaaaaataataaaagcgagatatttcatggcaaagcgatctcagggtaaacactgcacaccagtaagtattcttggggcaaatgggaaaagggttaaaatgaccagatctccagagatctcactcactatggtgaagacagcgccaagccatgagggctccgccccagtgattcaaatacctcccattacggacatgtttcaacatgagatttgggcggggacaaatatccaaactatatcaggatcccagcagactgggtgggtggaggttcagggatatctgggaaggactaagaatagctttttcttttagtagatcaggagtttcctcttacacacaaaaagctccaaatttaaactagcttaagaggaaagggtcattactggctgacaaaatgcgaagttttgtgcaagagtcagcaaagtttctctgtgatgggatatttaataaatattttggggccttgtagtgtttgttgccaactactcaactctgccctcatagtgcgaaaacaggcataaacgacatgtaaaggagcaggcatggctgcgagaaactttatttatggatactggaatttgaatttcatatacattttcatgtgtcacaaaatattattctttcccccccgcccccaaccatttaaaaatgtgaagcatttttagcctgtgtgctgtataagaacacagccgtgtttggcccagcggttatagtttgccaacccctgcttagagtctagctttattcagagcttaaatatgtcatcgaggtcccctctttatttaatcccttagttttgatgatcttttatgggttatattcttcaaagggaaaattctctccaaatggggctgccactggcagacgagcactgtcccatcttggcttgttcccccagtgacaagaagctgttttccccactacccttggcccaaaagccacagggagaaccaggattggcctagttttaggcagacacctatccctgaatcagtcatgtccccggatgatgcggttctctgcagcctgggcagtcaaggctggagataattctctgcttctccacggagtctgagaggccccgttccctaatggtaaaatgaggtccaattttgcaaaaggaggcacctggggaaacattctggacacacaaatctatagcttctaccgtcaatctgctatgatccttttatggttctgacgttgcaattttatttttgcatgtttctagagacatcaggaggggatcttttcgggatgtggcttcaaaaaggagcctgttggatggtctcttactagtggtcagcaaagaacagttcttttgtaaattgcactgcattaagagcattcctgtttccatctcattgatacctgccttgcgttctgttacctggaagcacaggtcaaggtagtcttcttgttccactgatttgatgggggtcaggatgctttcagaaaggaagtgagaagagtggcttagaacagggaaaatgtggccgggcgcagtggctcacgcctgtaatctcagcactttgggaggcctaggtgcgcagattacaaggtcaggagattgaggccaggctggccaatgtgatgtgagaccccatgtctactaaaaatacaaaaaattagccgggagtggtggtgttcgcctgtagtcccagttactcaggaggctgagccaggagaatcgcttgaacctcggaggtggaggttgcagtgagccgagatcgtgccgttgcactccagcctgagtgacaagagcaacactccatctcaaaaaaaaaaaaaaaaaaaaaaggacagggaaaatgtccaggaaggatgtggcttagctgaagatcagcttcagcttgatcccacgggaagctctggagggtgaattgtacagcagagttggtcctgactgagaccagggcctggctgacctatggcagtcagcgatgagccagtgtctgctggggaagagggcggcgtggacatagcctctcaagtggggcaggaaggggtagctgtgagatactagctaattcttacagcttctgggttcaccagcccggcaggagaatctgggttgaggaggcaacatgacaacgtgcctaccttcaccagagagactgctgtcaaaaatcactccatccatgcaaggaggaacgatgcagacacagaaattctctgctgtgagggccagcactgtagtatttactgacctgctccccactccacacctccaagtgcaggtgtacagactgacatcaaacctttcatcccgccctcggcctcatacctgctttccactctgtgacctatttacttcgatggagtcattttcaaataacttttgtttagtgaaactcaaggcttttcaggatgctgtgctaatgtcttccttttttaattgagtaaatatattatacacagctgggtaggttgtttccttgctggccttactgctacaatttgaaaacggatacagttttctttaactcacataggatgaatgtggcatttattcctggtttcctgtggctctcctcctttagaaaacgtatttacatggacgtttttgaagcacttcttaagacatcgaaaaattaaaaaagaaaaaaaaaaagaagaaaaatctcttttccctcccccaaacaatggttacatagtgacaacagtgggttgagctaaattcagctacgtcaaggaagagcaataaaaggagatggattgttctctaagcttcactttattggatattgtaattgacatatagttgtcatttataatcatctgtccattcctgtgaggtgggagcagtaaagttaattgtggcagctcatttgcattaatctcacctctgaagggtacagtaacccattaatatcacgtcatgatgaattatcacaaataacattgaacatattgattaatgatctctgagatttgtatctcgttaaaacattttgttagctctttaaacttttaagccaacaaccattgcgtgtaggaggggtttagagatcatctgagaggtggtggtgggtggtggtgtactttgtagggtcactggtttaaggggttggacaacccgttcccatctgattttcctcttcttcgggagccaagtactttttgttggtaacttccgtctactttttgcaggatagtggtttcttcaaaacagtggcttctttgattgtaaggtggctccgattctcaaatggaatgattttcttaagatttttaaaaattaccccttcaacaccttaagtgctggctttctgaacctcttgcccacctaggcatgcctgctactttgaagtggcaagagttatctttgtctattacatcagcattcctaaacttacatgttaacataaacatggagctcagaggaaatgtgttgtttgagatgaaccatcgtttcaaatgtcacttacttcttgttttataaagtatcattactcttttcttggacacagtctcatctttgaggtgtttgcagattttatctcctgtggacatttctacaaaatcaatcaacaaacttgagcagagaaatcatcatactagccacacacactctgcaggcattaataaaataatagtaaattctctttaaccaagtcctttgcagaatttcctggtagaagtttaaatgcaatagatgcagtaaagaaaagggttggcttaagagttgacttacaaagcttggtcctaacagctttttcctttatctgtttcaagagtcatacgatatttgatctttcaaacttacgtatttcttccattatgtttagtattagtttcgttttctcaagatacatatttaacaactagcaaaatgttggaagcggtctcctctgctgtctatttagggaaaatggaactgatctttctgaaataggcatgcatgtaatgatgatgtcattaatgcttggctagctggtggacttaaacccagagggcacttctgaaaaggggcaaagtgcatctgcttctgctttgtttatagactgtcagccttggatctgtcactccctcagaagggaaggattgaggccaggcaaggtggctcacatctataatcccagaactttgggaggcgaggtgggaggatcacttgaggccaggagttcgagactaccctgggcaacacagtgagaccctgtctctactaaaaaaagagaaaacaaaattaaccgggctgggtggcacccacctgtagtcctttggaggactacttgggaggctgaggcaggaggatcacttgagcccagaagttcaacattatagtgagccactgtactccagctgggtaacagagtgagaccctgtctctgaaaaataaaaactaaaaaaaaaattaagttagaagggagggattacgaccctcatgtgtatcaagaaacaagctccatgaagccccataggatggctcagcaccagaacgaggtctgactgttaagcaaagtcaagtgcatgatggctgaacattgctgggggaagattttgcaattatgcattgtttgtgcctttagccagtaggtaaggacagtggtaccattctgacggactctcggatgcttggttttatggagggatcttaaaacagtaatcggcccatatgtgcagcaacctttgcgcctaaatagctgaggacaaagtaggttgcttacttcaagagcccttccctttctcttctttgtcaggcctgtaatgttcctcacccactgagtatttaatatctgtgttttcacatcaaagaacaagctttctgtctcccaggatagtatcttgtaaagccagcctctttattacttcaccagttttaaggctttattacttgcgacctaaagcctgctagtgaattatgcatgttagaactcacagcaccgtctctgcccactcttttgccacctttttgggggtccaaaaagtacaaggcgagatcgacgtgtgttcattcccatccatggtattaatccttattcatttaaaaaaatctgctaacggaaatatttccattcagctcattaatcaattgtgattttcattcccttgttttgtaaaagctgttgcaataaatacttttttcacaaggcgaaaatccaagagatggatgcagccagcgtaattaattgcacccagttacaggagatcagcaagtttgtgagattcacatgctgctgtaccatatggttgcccagtgggcgaaaaatttgattaatgttttgaagtagatttttttcagcaaatattgcagccccagatgaggtgggggttgtcccccccttttactttctagtattgttagacttagctgaaggaaacaatcctctgatttaaagcttaataatactgtgattcagtgaaaacttaacatgcgataaaaattacatttctctcatctcttgtggatacagaaaaataatacatgatgtcttcgtttgtaattaaggaaaatgtgatcgttggattctaaaacttgattcttgattttttttttcccctaagaaatggaactgtggttttcactgatgcacttttggtatgatttataagtagtatatttgggcagactcttcatactcaaagcagtaaaaaataaaataaaataaaatacaatgaatccacaaacagcttcttcttcattatgtaccctatacctattagagcatcataaaatataactatatgagtatcatagaaaagttaaagctgtctctactctgttatgctaagatatattagtttcataaccactcaatatattcatagttaatttatcctttattttaaaaaaatgtcctgcagattttaaaatcaattttatagtttcttttctgtttttagttagaaagttcattttatcttagcagctccttgtcatactgggcacccattctcttaggatgctgcccttctgacttttttctccaatacctgggagggaattagccatttggtaatacaacgggacaagcttatggtaggtctgacctcagcattcagaaaaacaatgtgaaatttgtaatatgtgtcagaactggcaatcaacgccataaggacaataaaataaaatacatttctccactttagtaaatgaggcttcatgcttcctatggcataacttttttgttgttgttgttttttcttttctttgaaacggttttaaatttctaattgcctaagcaatctatgacactccttcaatcttaatgtctgttgaaatgaactagcatctcaagcagttggagcatcatctttaactagacatcaacctggttttgaatcctttgagttttggcaaatagaaaattcatccagggccacaaaaaatatctataattttgacccagttgtagtctagagagatacttagttcaaaaagaattgtgttatcgtcatcaagcaaaacaacagtatatgctatcatctctgagatgtcacacgattattgctttttttttccttttaaattttttctttgtgtctaaagcagtttaagagctctaagtgtgctctgttttctgatggcttaacaagggactggctcaatcaaaatagagaaggaaaggacggagaccaggccaaaacggccatctcctctgattttcgattcatgatataaatttttaaacaaaaaagttacagtgtttttggtactttcactaggcttctaattttttttcctaaacttaaaaaaatttttttaagatcaattatgtaataattagccacaaaggcacaagaactgtttcagtagtggcctgttttaatgttccattctgaagaaactggtacagcctttctttcctgagtttgagctgaaactctctctttcccttttatcaggtcgctcaaaacagatttttagagtgaagcagttttagggacaacatttaggagaaacatttccctaagattccctaacatttttttctttaatttagccatttctaatgaatattttttaactgtgcaatttaagtaatgatttttttaatgcctgctaccttcaagacacttcgtgtggtcacctccaattatagactaggtttttaaatgaaaaacggaaacacttttaaatttttatttaatatggccggtgaaacatgaacaatatatgatcagttggcaggagacagtgtgatgaattatttatgagtttacttttttttttttttttgctttaacagcacatacatatatgaaattcattaccaagtgataggacgggtaacccagaggttctgatgagggccaggacctcatggtcataaaagtaacattagacctattcctagtaatttgatctaggttggcctgatttttgttgtggtggcagtggtggctgtggttgtcaatttaatggaatgtatttggaaagagcaagcttcttcccaatgcagtgttttccctgcaaaggagaagaaatatatttcttgcctctctttccttagtcctgtgtgcttccccttgatttcaccaggacaattttataccaatcccttgtattttagaagagcctgatacatttgcaaggtctctctttatattcctgaattttgcatccctagacatcatcctttttgagagagaaaattccgagtgtcagttttcctttatcggaacctccttttatttgaactaaccacaatgggtcataatttataggcccagtcagcgcatcattgctcagatagagtcatttacctacaagtatccatcagttaggtgggggctgctagattttttaagtggaaaaaaatccaaacaggttcaggaagaagaagaaaaaatcatcctgggggcagaagaacaacaacaaaaaattttccttggggccttccaatttgagattgttgagtgttgccaagcaaaactaacacgcagtgggaaggttctgcttttctcacaaattctcggttaacacaaggcgtgccaacagctggtagagcgagagtcagggtgccaggctgaaatggagtggaaggcagccctggctggaagtcttgctgggaacctggagcgctgggaggtaaaactttacttggtgctggcagcgtcactatgccagtctgtttcttcccgagcttcaggccatgctgatgttcaagttgaataaatgagagctaatgattttttaaggcgtttttagtgaattgccgtgggaatgctaagttggcaagaataaaacctaggcgaggagagttgatttttgatgacccaaagaaggcatgtcctagagtggtttagtagagctcgaatagtctaagattgttccacatcaggaaaagtgtacagttatcagaattacttactaatgaaaaaaaggggaaaaaaagattattaggctgcagggtagtgggaaggaacagggtagcaactctacagtgacttggtctgagaaaccctgtaacttggatccagccagggaagtacttttcccaacaatcggttccgctgtcctgctgtgaccagtaacaggggaaaaaaataaaactcccctaaaggtaaatgattcacctcatgaacgaagggaagaataagagacctaagtttatatacacagattccaattgtaaaatcaaacctattttgttttctaaataaacaatatttgaaaatacaacattgcagtcttgttttcttttatactggctaggatggtctggtcctttagaggaggtcctgaataaaataatatgggctgtagagagaaacgccgtttgcttgataggtgtttttgtaaaggttttactggcctacagtgtcagtacattgcaaatttaagaatgttcactgacatttttagtagccacttaaaaaatttttctaagcaatgatgtcattgtattttacttataatcagaagtacatcagcccgtgaatttagttaaaggtttttaatgtcacttttattacatttttactgtgcattcatgtgcacacacacacttttaagcatttttgatttatatatccctctgcatattttgtgccttgtgatgtgtttaacgaatgacagtgtctttagtgcattgctacttggggtttctacactggaagtgtaatccgaggccttggaattggtcaaacaaaactcacttggcaacatttacttagagagcactctgcgagcactctgcgagcggacatgtcgatatcagctccctcctcgttcccccccccaccccccatcccatgtttatttgtaattaaagttaagatgcttgagaatggctttaccattaatctagaaacatagagttgtttcctggtgaatgatgtatgacagttttctttgtgcttcctctgaatagagagtagtttttgtggcattgttacagagaacagctttcctgtagggctcacaggctcaactgtttcaaactcctgttgttcggtaaatctgtcagaagggtctgcaagggaccgtatttatgaagagagtgtagagtggtcagtctaaaaagctccttagtgtagtactttgaattttaaattacacacataattcaaaggtaatgtaacttgccgtgtcggactttagtccattccgttaaatggagaaaaatgactgacgtgaagaatgacttattgattcttggtgggaaaatgacttctgtaatatgggaagtatggtaaaaggaatagcttaattatttagggagcacttttcaaaatgtgcttttacagcagtacaaattgtacgtatacaaatggtatgactaggttctttttttaaaaattctttcataggagaaagttatgagaaggcttatattatttcgttgctaaggcaaagtttaattttgcttaaattcctgtaagactaactaagaaaggtaggaggagtgatgagcagtttcttaaccctttaagaaatatgacttgttctaattgccttttcttatttacattatacttaggctggtgttaggatgccgtggctgccaagtttacacagtgcactttctctctctctttcttcttttggtttatgatgtttttcagtagtgtcatggaactcacttaatctgatttcatcaagtaaatatatgggaagttgagatgacatatttttatctgacatttgaagaaatattcataaaatagcagataaaatatttattttggccttttcattctgatctctcttttgactcgatgtgtattctttgcttaaggaccacagcctaatgttattttgactgcatttcacagtgttggcggcctttcagataaacagcatatttgtggttaattggctgaacatgttctataattataattatattaaaaccttaatgttcttgaacgtttgcccgcgaaggccactcacgtgaactaagttatgtttctgtcgttataactgagctggctggcggctgccattcagcaatccaggcaggactgggaacctgggaaaactgcagaggtttcttattatttcggtctgaaaccgctgtttggatagttttagaagttgaccatgaaaattgccttctggttgtaacttggatccccaggtttcaatctgtgggctaacgtttcttgggattttcagaaaggattggcttggctttttatcaaagttacacaacggctgtaaaaaataaataaaaaaaaagcaaaattagcactttatcaagtttggggcatatttccaaggccaccagggagcagggaaagtcaccaaaagaccgctccttgaaaccaggcaagaagccatctttgcagtgagctgagaggtctgatggccgccagctgagggagggaattccccttttgtgccttcgggattgatagagaagcccagtggacttagcatctgggaatcccagattgatcttttctggatattgggtcaaccataagatggtacctttccctgtgtaacaaagtcagattctgtgaaacacctgttttttgtatggcttatgagatgaggatgatttttaccttttttttttttttttttcccttgagacagtgtcattctattgtccaggctggagtgcagtggtgcaatctcagctcattaacctcaggtttttttacagaaaaagtttgccaccctctgatctacatgatgtccttcagtttctgtctctcaccagactgatggtgccatgagggcaggggcaactcctatcctaaggcgtggcccatagtaaggggtattggttagaagaatgaaagattgaatacgtcaaagtgatgagtacagagctgtctgtcattttcttatctttggcctaacaactgaacacattttatgaaatttgcaaatctgtttccaaacatgtttgaatggatttttatggtcttttaattaacccaataaaaatggtaacaacacagcaattttaagaaaataacagagccaagtattttttatagctatgcatgcaatccacattacacccacatgcagtatttctatggtccaaataagtatctgtcggacttagaatatttaaattaggatttagttgaaagattatgttctatatcttttttttttaaaaaaaaggaagaaaaataaagctcttcctaaatttatttacatgttggagcaattctggcactgctaaataaggcaggaaattccattaagtttaaatgtgctgcccttaccctaaagtgtttggagggcttcgtagaagagccaaatagattcacacagatcttatttgtagagctgaatgtgcacttcattaaaatactttgtaaggtattcaaggatgggctaggagggtgaggattccaaatcagaatcttcaagccagtgatccaggccaaaggtattctgccagagtgtgaggaaatttcacagcctcatggagacacctcccctccccacccttgttgaacagactctggaaaagtcaccatttcttgttggtcctttgctcttggagcattcttggcctgacctgtcaaccactttagcctccaaggtatctgagcctttctttcgcctctctacttagatcatattcttcctggattttggaatcaggctgggacacaagccacctcctcctccattctagctgtgtggctccaggcaagtggccacacctctttgagccactagttaactcagctgccaaacagggattatacatttacctcttggtgttgcaagaattaacaaggaggatatttgtaaatctccctgggagctggatggtgcttaataagcaggcattaagggttgattatctttgcactctctcctgccagattttgtaactgagtccaggcatctttagaaacagaaatggtccctgctcttctgtatcccctgggataacctagcatcatttcgctgggttacacatcctctcttctctcctgtatgtcgtccctctttcttacggtggttctaagctctatggatcacttgtcttctcctctgagcgggaactgggcaattggaggttctttcccctcccgtgctggtgggagaattgtttagtaggtcataaagtggaatctccatttcagtctgatccggtcaattctggtaggacttcatccaagcacaaagaaacctttgttttcattcaagacttccctaaaaggtggctgggtgcggtgcctcaggcctgtaatcccagcactttgagaggccgaggctggcagatcacgaggtcaggagttccagaccagactggccaacatggtgaaaccctgtctctactaaaaatacaaaaattagccaggtgtgttgtcacgtgactttaatcccagctgctcaggaggctgaggcaggagaattgcttgaaccctggtaggcagaggttgcagtgagccgatgtcatatcactgcactctagcctgggcgacagagtgagactctgtctcagaaaaaaaaaaaaaaaaaaaaaaaaaaaaaaaaggctttcctgaaaggtgattcacaggcctcttcggatcccttcgtgtttagcaatttggatttccacacagccttgctgtgccttctgcccatttgtcctctgctgctggtccctgggtgggacagctcccctttctccttgtctgggttgctcagatagagccataaggattctccctgcctcaagagctgacttccttccacgagttcctaaccacctgtccagttgattcttctctggacctgccttgacatctctgtgccaagcccagtgccggggttgcagatgcagaggcactggtgcatatttcttgagttgaagagcttgcaactgatgagccccttccactcagaaaaatgttgttcctggtcttgccactgcctggaacccaccaacacctcctctttccaatattgctggcttctacttgttctataagagccatgttctacaagttctgtattgtgtgtgagtccctctcaacaaaacaatttccctagtcatctcttatttatactccttgatgcagatttccattttactcttacctcattctatcataattatctatttgtgtgtgtatgtatgtccccactaggctgtgaggtctgtaaaaggatagtctaaatacagctatctattgcaaatcttataatgtgactccatgatgagatagttggatatagccttatgttcccagcaggaaggaagaaaggaaaggagggagggaggtaagggtgagagagagacaagaaaggaaaggaggaaggaaggatgggaaggagggaagaagagagtttggtcaacatttgttgattgtgaatgaacaaactaatgaacactaaatgaacaaatgaatgaatgaatggacaaatgaatgaatgtatgagtgggtcaagaacaagattcggccccaaggagatacgcgactttctactttgttttctatttggatttcacacaaaggctctaaggtctcctggtaggccatgctcagaagtctgggttgtcccctgcccaggacaggctcaccctggcctgtgtcctaggtattgtggggccgctgtaggaggatggtggttaaatcttggaggaaatccaggagtctcatgtccccttggcttctgtcagaaccagtacctctcatttattttgaggtcttggctgaagatgtatcatctacaaccctgcagatcagatgtgttagagcagagagagtggcgaggattaatctagactgaaatgtgctaatcaagctgtctcagatgccattttctggatagggaggaacagcagttggcgagtttaagagcaatatggaggaaccactggggattctatgcatgatcttaggggaagtagcattattatctccaacactggctgtttacattatcagaataagaatggttctccaaggccaggtgtggtggctcacgcctgtaatcctagcacttttggaggatgaggtgggtggatcacctgaagtcaggagttcaagaccagcctggccaacatggtgaaaccctgtctctactaaaatacaaaaattagccggacatgatggcaagtgcctgtaatctcagctactcaggaggctgagatgggagaatcgcttgaacccaggagatggtggttgcagtgagccaagatcgcaccactggactccggcctgggtggctgagaaagactcagtcttaaaaaacaaacaaacaaacaaacaaacaaacaaacaaaaacttgtctccaaatgagcagacaccagaatctcatggagggatttttcgaacacgtagcacagggcttcgcccccagcatttttattttcgaacttctggagtgcagcccaaagatctgcatttctagcaagttcccagatgatgttgatgatgatgcctgtttgggtatcacattagatgaagggctttgctaatttcagctgcagagtattgactcatggggtaggattcctgccatctgcagcttctttgggtcatcactagggtagaatcttattttctgagtatgaaaagcatcaaagttattttagtaaaatgcttttgctgtcattgctttaaaactagctcttcgaagtgggaaaaccaaaagttttattgaagcaatttgttgtaaatatgagttctgtatcacatttgggaaatttgtaaagccttactttgaatgtctttttcttcactctatctgtattgtttggtgctttctatataaatttataaattggatgtaccgccacagatgtcggttttctggtaataatacttttttacattaaaaaaaactcctgaaatgaaaatgtaacttagtcttattattgtaatctccccttgcctttttgcatggatcatttgtttgtgaactggttatttcaggaagggctcaaaggtaatttcatggtttatagcatttatattggcgccttcgatgagcaaaacatattgttttctaatacatgaaaccaggaattcatatatatatgtatatatattattattattattttcattttctaaaattacatgtagtacatgtatatcaacttcaagacattgagaacaaccatgtacagaaattatactctgtacacaggggaaatatgaaagttttgtaatgcaaaaaaataaaaaaaaatcaacatttgcaagcttatgagatgattttatttttaatgaatccaaatggtagcagggagctgctgttgtgtttgtgcattgtacagcaattcatatctaaaaataaagtaacatatggctttgttattatttagtttaggaattgatgcacctaaaggagttttgagagctctgggtctcgttcggttgttgtacatggcaaccaaataagagtagctggagcagagactttctcttcttcagattattaagatttgagcaattcattttttttggatggtgtttattaaagtcaagaaatcttttgcttatttgctaatgattctctcccctttctcttcttatatttttgaaggctgaattggtaaaattatctggcccaataaaaatatgtcctgggttggaaaagagcacaagtttctttttctagccctggagtgaggtggctctctggcctctgggttcgtttggtatcctggggagtcattgacacccacacactcctagtcacaagacctttccctcccatccagattgtgtttattttacggctctcgcacggagcatgcagctgtgtaaacctgagaatggtttctgcacagctttgatctttgcatggatcaacagttgcccttagtccctgaaccctgttccatggccccatatttcttggatttttccattttctagtaattatggcatcatgtagggagccttccaacagcatcccccacagctttgggtggagaatttggaaaaaatgccttaagtctgccatttgtagaaccatattaagtagtgatttccatttgatgccaaaaaaatatgccatttagtttcttcctaagaggcaatctgacaatttcgagtagactgctggagtctgacaaatttgaatgtattatggactgaataaatgtttattgaacaaatgccatttttttaactcttaaaatgttcagttcttccaccaaacatagatgacacaactgttggagacggagcaccggactgatgcagtgtagcattattttgtaatctacgaactgggagcctatggagacctatgcatggtggaatacaaaagtcatgacctgtctttatatcctagtatgggcaataaaaccctccctttaatagccttaaacatggtacaaggaaactgtgcaggagttccagggaaggtgccatttttccatatggagttgatatggtctgactgtgtgtccccacccaaatctcatcttgaattctaattgtaatccccatgtgctagggggagggacctcgtgggaggtgattgaatcatggagaccgttcccccgtgctgtgagtgagttctcatgagatctgatggttttgtgcggggcttttccccactttgctctgtacttctctgtttcttctccttcttgccaccaggtgaggaaggacatatttgcttctccttccatcatgaatgtaagttttctgaggcctctgcagccctgtagaactgtgaatcaattaaacctctttcctttataaaccacccagtcttgggtatttcttcttagcagcatgagaagggactaatacaggggtgatcacaaacagcctgcagactgggccatctttcttaggcaggatctcgagctaggagatgagaagagctctataggcaaaaagaatgacttggaaggccacatatggcagagtagctaagactttggggtttccagtttcagatagacatgggtttgtatcctggctctgcccctcaatgcctgtgtgatcctgggtagtttgcttaatccttatgagtcccggttttctcctgtaaattgggattaataatagtcacagctagctgggtgcagtggctcacacctgtaatccccgcagtttgggaggccgaggcgggcagatcacctgaggtcaggagttcgagaccagcctgaccaacatggagaaaccttgcctctactaaaaatataaaatttgccacgcttagtggcacatgcctgtaattccagctacttaggaggctgaggcaggagaatcgcttaaacctgggaggcggaggttgtggtgagccaagatcgcaccattgcactccagcctgggcaacaagagcgaaactctgtctcaaaaaaaaaaaaaaaaaattatgtccttctagattgtgaggattaagcaagaccatgcatttacattgtttaacactgtccctgagacatagtaaggcctcagtaactgttagctctcttattgctaccggacaagtgttcttattttcccttttcttcttcttccttttcctgttccttgcccttcctctttcgaagaaagtttacgccaaaaaggatgagctgggttgcagccagcattctggtttcacaggagcctaggagatacatggagaatattctgaggctaggttaaatagtttgtctccagtgtgggtgttagtcatattcttatcagtatctgaagaacccagaagactgactctcagaacggaaaactcttggctagaggattccgaaagctagcgtgaagtggaggctattactcagtgggtgccgtaacatgtctgtgtcacctggcacctttttattctctaatctcaggagtgagtgcttcctcctgccgtgcctggccacttctcaccttcagagtctttggtatgcataaattcttcatcacttcagtagagtgaaccctgattacctacatttattaatgaaaacaaccaagaatagttgagcccaaaagtacaaatcaatgtgctgaatcagtttatgatgtctccctaatttctgcacatctgttgagctgtgatttcaaattccattccatttcttttcttttcttttcttttttttttttttggagacagtgtcttgctctgtcacccagcctggagtgcagtggcgagattggcaagatcgtagctcactgcagcctccacttcctaagctcaagtgatcctcccacctcagcctcccaagtagctgggactacaaggttgtgccaccatgcccgcctaattttttgtatatttagtagagatggggttttgccatgttgcccaggctgttctcgaactcctgggctcaagtgttgtgccctgtttggcctcccaaagtgctgggattacaggtgtcagttaccgcactggcctggaaatcctatttcttgtcaagcaggacatcaaagttgagatctaagaatttggactaaaatttggggcaggttgtttccactactgtgtattgagagatggcagggaccatcttgccgagtccaagagattgtgaagtctaaaaggcttggccgcagtgttggttcatctgtaacagctgcctacaagggaatctttgagaaatacagattgctgcatcttataagaaggacagtgcttaaaacagaaagaattgagtagaaattaagacatagcttgatttttttccaacagaatcatgaagtctgttcaattttctttttaaaaagtaatttaatcttctagaagatatctacgtttattcaataatttcctaaggtagtcttcaaaacctaggagcctaggagatacatggagaatattctgaggctaggttaaatagtttgtctccaatatgggtgttagtcatattgtcatccgtatctgaagaacccagaagagtgaccctcggaaaggaaaattcttggctagaggattccgaaagctagcgtgaagtggaggccgttactcagtgggtgccataacatgtctgtgtcacctgccacctttttattctctaatctcaggagtgagtgattcctcctgccatgcctgtcctccctccctccctccttccctctcccctctcccttctcccctcttctctttcccctgtctccttctctccctcccttccctctcttcctttcgcatctgacatctccaaatagtttttcatgcaatggcattactaatggcttgactttttcgggaaatgattcattactttatgatttcaattcagtaaccattttcagctatgccataaatttaaatcctttaccatcaagataacgtttttttctcctgtcactgaaatattatgattggaaactatttttaaaagttgactctgtttgggacagctcttagggatttgtcctttataccagcatataacttgtaggttgtcagtgtctccaggggccatatgttcaccacctagactcaacagttgctaatgttttgccatgttttgtcagttcatctatctgtccatctctttgtccatccatccaactacccacttacccatccatccatacatttatccatccatctacccacccatccatccatccatccatccatgcatccatccatccatccatcatccatccatgcatgtaagttgcagacatcaacaaactttacccttaaggactttggctggcatctcctaaaactaaaggcattgctgtacgtaatcacaactatcatcattatcatgtctatgaaattggtaataatttgctaacataaaataatacctagtccataacaagatttactgaattattcacaaattgtcttttatagctttttgttttcaatcaggctgtaaagttcacacattacatttggtattgtatcttattagtctgtttattaaagagtttttttcagggatcagggttagagggaaggctcctttctggatactgtgtatactactaattttctttatcggctaccaaggttttctttatttttttcatacttttctttcattgaggaaacttattgttttgtacattttgttgtacctttatgaatctggttttgacttctggcccagctaagaagctggtttcctttggtgaaacatgggagaagagggaggaaaaatctgttaattagaattgtgggcgtgcactctgtttatctctaacagaataggcttcccacggctctgagctggaaaggaagattcaagtctcaggttaaaaaacaaaccctccaagacctcagggctgtttgcctgtgattagagtctaagaaagactgagaattggaaatcaggactgtctctggtcactgatggttcaactacagcacagatgcactgggtaacagacacaccgccaggcctcaggattacgttacctagggttaggactgagcctttcttccaccttcttggggttggagggcaggaatttaacatatcttagatcacagagtaaggcctcttctacccataagtttggtttatacatcaaagtaacattctaaaattagatgagggtgttttttttttttttctttttgagacagggtctcactctgttgcccaggctggagtgcgatggcacaatctcagctgattgtaacctccacctcccgggttcaagcgattctcctgcctcagcctctctagcagctgggactacaggcgcctgccaccatgcccggctaacttttgtatttttagtagagaaggggtatcgccatgttggccaggctggtctcgaactcctgacctcaggtgatctgcctgccttggcctcccaaagtgctggggttacagatgtgagccactgtgcccggccttagatgaggtttgtagatgtgtttttcatattcccaaagccatgaaatttgacaggtaaatatatcagttataaaagttttaggattaattatcaactaactcccagaagttgcctcagcctctctttttcagccttgtcttgccccagcccagagacaagccacagctataggttttatttctgaaggagaaaactcagtggaccattccactgcctcaggagatattgcctacctgcagacatgttttgtcttatccacacatgatgtaaaaacaaaataaaaatgctgagagaaatgccaattcagaggtttcatataaaaatatagctttcccattagacttgaaaattggaagaggaggtaacaattggccagtgctgagtagagggcatgtggtctctactttgccacaatctccaccataccttattgtctcccttctcagtcgaagcagctttacacactcctgctacttgccaagacactgtacacatttaagtttgctacctgttacttggcatatctcttggttcctaagagttttaggtattatgcaatttgccagctccctcagcccctttcctggctccaaacctttggctttggtttgatgttactgggttgctgcaggaaatttccctgtggacctcactactttatcaactgtaatggtcttgttgaagacaaggcttagaacatcatcagacccagagcctttctcagaggacctgggagaactctccatatggattttcatttgggaagatagatgctcttattggaacagctggttttccctttaaaacagggagtccagcagcttctaggatgcttagaatcagaattgttgctcactttttaaggtatagagtatttgtcttattcttaactacattttatatctttgcccttttttcccctactttaaataaaatctatctctaatttatgttacttaagcaatgacaaattctttttctgatagacaaagtaaagtataaataaataagacatccaagtaataatcagaagtattttttatgttggtctcattgtggtctttttaatcccaggcctgatgcgctttaggtaccagccttggttgaagaggagcttgaacagcctacacagacatgaaacttgagcaactgagctcatggacgttgcttttaatcaggatccagaactagggagttgagtgagcttggatttgagctccacttttcaaattttcaccacctgtgctctttcgtttttgttttttgtttttgtttgttggttggttttttgtttttttgagatggtgtttcgctctcgttgcccagtctggagtgcaatggcacaatctcggctcactgcaacctccacctcccggtttcaagcgattctcatgcctcagactcctgagtagctgggattacaggcatgcgccaccatgcccagctaattgtgtatttttagtagagacgggatttctgcatgttggtcaggctggcctcaaactcccgacctgagatgattcacttggccttggcctcccaaagtgctgggattacaggtgtgagccaccgtgcccggccagacccgtgctctttctcccaccactgccctgtgccaaccaccacccccactcctattctggaaagagccaagccgtcagctattgcttttgaatctatacgcaattctagcagcttcttttagagcccttttaaattagcatgaaatagttttactagccctgaggtttcagccaaggagctttaaaggagccagccctttgtttacttatttttcctcttctgaacatttggaaacatagcttcggtgctccttctccaagaaacctgagtcatgacctccccaaagtgtttccttcccgtggcctcttctcccgatcagctgtttgttatctgagggattcgttaataaccaggacatctgattctcatcattactcatcctctgctcactctcctttctaatgcataggcctttagccttttactttctacctttttgaatgctatacttttttgtaaaattttaattaggttaatgcattgacattgttcaacattcaaacgatggaaagggtgagtgtggaggtttggtttccccactttttccagccatgctgttgccttctgcagaggcttctagaattttcagatgaatgagaatcctttcagaaatagtctctgcaaactccagcacacccatagtgctagggtgggtcttagtaaaatgtctgcagggtaagcacactgttttgcactccacacaattcacttcacaatatttcatagagactttttcatattaatatataaagagatatatacgcgtgctgcttcacgataatccattgcagagctggtctgtaatttattcaagcattctttgttgatggatgttagggttgtatccattattttgctattatgaacaacaccataatgggcaaccttgtacacatttcctgtcaacatgtatcactgaatggaaaggatctattcctagaaaggatccattcctagaagaggaattctgtacaatatggccaactttctctctgttgaggttgaaccatttgacacatttcgctagcattgggaaaatccccattttcctcactatccatttttcttcctctctttccttcctcttttcccttcttcctctttttttttcttttctttccttccctttttccttttctttccttctttccttgccatttaaaacatactgataacttggcagcacagggcagtgattaaactcaggcactcaccccaccctacctgggaatctgaattctgtcttttctgctgctgtggattctcagtccccaagttgtgtaaatcaaagcttctcctgccacactagtgtgtattaggccaggacttcatagtgtgattcaaatcaccaactgaatttttttttcctttccttcccctttctgggggactacgtttttcatggagaccggggccctccagctgctgtgatgatcctcccttgccagggaggtgctgttaatagcaaatgccaagtgagctggtgttctgtccctccggcctccttgctcacaatagccaggaggaaaaagccatgtaacctctggatgagtcccttggccatttagaagtgaaatgaacatccaagaagaagcatagacaatgtggaggaagaactcttccaaatgatggcagggatatttggaatctttccccctgagttccctctggaagttaaagcccagatcccgtgaactgattaaaaagccccagaccattcccgttccagtcatcttgaaactgagcaagaccgtgtcatccatggagcttgaacataggagcactttaaaaaaaaaaagaatgaaaagcccctttcttgttttggtaatgatttaatgacagaaagtcacccacccaccacttgggtaccacgcagcccacattaaacaattagcccttgacagtggatagttcaagttagtttgaaatgagaaattgccggtgacctgaaacccatcattattaaccttgtggcacaacattgccataaccagtagccaactctcattttttctttttcttttttttggttggaagaaaggctcattgaggaaagttggctcagttcttttttgagtgaagtggtcagaccaccaagaattactttcctttgattgggaacaggttctaatacagatgtcctttacatgggcaatccacttttctcattgattccacaatcaattcgagctgtgtttatatatagacacctgcccacagagaccatgtggagaagcatttgcgtctcgctgcctgtcttccaaaggatttgccttctagtaattcatgtttttatagcttaactacatttatagtgaacgggtggcttcttcatccaaagaaagaacaaatgacaaaaagaaaaattttgatgatttgggaaccgcatttatggaataataacattcatgatacctctggataatgacaataattacagtatacgattctagaagggtgagtctagctgttcccagtgtgtttccatgggttgttatgtgttactggtcaggcgatcagggatttgctgaagattttctttcccatgtggcagtagatatttcagaaccctgcatcatggtgtccacagaagtccccagagttgtatgagagttcatctgggcacctttcccaaaggcaggccccctgtgcagcttcaactattcactctatttataatgttgttcctggatattgggcttgcttccacttgtggccaggagaggatatttcttactccagatcaaagagttgagacattgccttcccacaattcccagtgagcccaactccttaccacaattcccaccccatgccttccccaaattcctgatgagccctatgccttcccacaattccctgtgaattttgctccttcccacaaccccagtgagccccactctgtcccataattccctgtaaatctcactccttcccacaatccccactgagtcccattccttcccacaattccctgtaaatctcactccttcccacaatccccactgagccccactccttcccacaattcccagtgaaccccacttgtgtagtgtgtctgtgagtagtctgcccactctccttatgacaggtttccagtattatctgtttcataacccatttccaaccttctgggttttttccttcaacgtttcctgtgacagttctccattatatctttgttagataatagttagcaacccattaataacttccaactttttgagcctctaccatatcttgttttcactgggatttctacaccgtggctactttgtgggacctgacttatcaagaacttaagcagcatctgttagaaaaggtattttttttatgaagtaagtagggaactaactacctgttcactgctgcccgttcattgctagcacaatgccaagtgtcaaataaatgtttcttgaacaagtgaatagagtacgcttctaggcttctggaaacggtgaatgttgctttatgtggcaaaaagggactttggagatgtgatcaagttcaggatcttgaaatggggagatgaacctgaattaccgaagtgggccctaagtacaattataagtgttcttatgagagggaggcagaggggactgtgactacgaaagaggaggaaacagggagaagaggtgaagcaggtgtgaggcaacaatctggtggcttctagcccctgaaagaggtgagaaatggattatcatttggaggattcagaaggaaccagctgtgctgacaccttgatttttttaacccagtgaggttgattttgggcttttgacgtccagaatgataagagaataaatgtgttgttttaagacctaagatcatggttatttgttagagcagtgatcagaaactcatacaagtatgaatgctaagagtaaaggcacctgcctcccacatactggacccttaatattccttttcatgggaggttttgcagattgctgccctccttgctctccttactcttctccttttactgaaaagatatttactagatgtctagcatgttaaagactgtaccttaaaaaaaaatcacactctaatttagcacagtttcaattgtggttaagcaccatgccattcacacttcagaaccaagctcagatccatgtgtgacactctggaatgtggcagctgatggaggaagggggctgaagttgaatctgcagtagttgagttaaccttcccatggtgcctgcactagcagggactggactgagaccccagctttcccagtcaggccttcatttttctctcatggtgagagctttggaaataggcagtgcagtgtgggagtccttcccctagcatgttagtggccagcaccatgccacacagccacccagagctgcaagagagtctgcagaggtgattgccccttgctaggtgagtgtaaaccaaaaataaattctaagctccccaagcaactgaatggatccctgcctctgggccaaggggattccgaaataaacctgaaaaactagttcaggcagtgatgggaagagggggttggatatgactcattatacccttctttttttggaattcagtcacaactgaacagcattagcattaaaacagatcctaaggctgacaaaacagactctttatagcaataagataccaaatttcaaccctactctagtataggatcactttgcagatagcaggcatggaaagaaatcaaattattttaccccaaaatatatttctctggtatatttcgaaatggccctgcaaagctgtttcttgtctacattctgtagagaacatccttccctttccaggtcttttcctgatccaggagagattcactaggagtctggcacctttttagttttgataagagatatttaccatttattctctctgaggcctatttcctggaggcttcatctgcatcataagaaccttggtctttttgtggacttatcttaacccagatagtcctttctactgatgccaggtgtttagctaataacacttttaaccaattgccaatcagaagatccttgaatctacctgatacggtttggccgcatcgccacccaaaatcagacagtcctatctgttgatctcgggtgtttagctaataactcctttaaccaatttccaatcacagaatgcttgaatccatgtgatatggtttggctacatccccacccaaaatcagtcctttctattgatctcaggtgtttagttaataactcttgtaaccaattaccaatctgaaaatccttgaatccacctgatatggtttggctgcatccccaccccaaatctcatcttgaattgtaatccccacaatcccgacatgtcaagggagagaccaggtggatgtaattgaatcatatactcccgatagtgagttctcacgtgatccgatggttataaataagtgtttggtagtttctctgcgttcattctgcttcctgccgctttgtgaacctggtgctttgcttccactctgccctgattataagtttcttgaggcctccccagccatgctgaactgtgagtaaattaaacatcttgcctttataaattacccagtttcaggcagttcttggtagcaatgtgagaatgggctaatataccacgtatgacttggaagccctcatccccatcactttgagttgtccttcctttatggaccaaaccaatgtactccttacatatattgatagaagtgtgcctgtaacttttttcccctaaagtgtataaaatcaaggtgtaacccagccaccttgggcacacgttcccaggaccccttgagactgtcttaggctttgttcactcttgtttgggtcgggaataaacttctttaaatattttagagtttcactctttcaatcaacgtacgtgactacccagaattaaactggaatgctgttaataagagaaatgaaaggatgatgggagatgtgcacccagcagtgtctgtcttgtggtcctgaagtctaactctaatcctggctccactacctggaccatgacaggttgtttaattgttctagttagagtgttctcctatgtaaatagggataataattggatgtatggcaggatttgggggaggattaaattaggttatatgcgtgaagttcgtagagccagggtctgggcattaatacgcatttagttactgtcgctcctgtgatctgcacaattattgtcattatcttcccttcctcctccttccccctccttccccctctctttttccttttctttctatcatcatccatagctctcttgccccattgttttaaacccatctgtttttgttgctggtaactgtatccaaaagtaatacagaattttccgtaagaacatttattgtgtttccttctacccacgaattttcttatgctacacacacaacccactgaaatttcacctctattgtatgtggcttttctagaaacgtgtgcttctgggctttgtctcacacctcctggccagtgtttggcatgtgctcacacatgcacgcacacacagcctgcactatgtttgttgactgaatgaattaatatttcacagaataacaaacacatgctgattatactccttgggaagctaatttgttttcagctctgagagcaaggccaaatcaccagattgatgcctttggctgtgtatctaaaggacgtgccattgcagctaagtggacctgaatgtacagtaagacttagtggtcaccagaatgcatgccaccccggtgcttctgcatgcaaagggtgcgggccatgtgccagtcacagtggaaaaggcatgcttcgtgtcagcacatttggcatctctctgggatcggggatttataccccaaaaccttgctctagagatttggcttccattagcaagggtaaggcttgtaagaaaggagttttactcacctttgcttgctctcacagctgtgtcagcccattttcatctcttttcaatgttttaagccctgagagaacccagttcaattcccagcaagaaatgagcctctgtaacgcagccccagacccaccttcgagggtaggggcacccttgttgtcacgatgtacaggagccaggcttggcatcggagtggatgcttgggaagccccagagaaatagacgagtgagtgcaagagccagctgcctgcgtggcttagaggaagatttcaaacacctagtgcactgaaagtctgacttaatttgtgatttgtgaatagtctcccagaagctatggggtacagatgtgggacttgtgaaaaataccagacatcctgtgggttaaagaaaaagaaaggggggcggtgggtgaagtgtgagcaatttctggcagctttgtgggcatttattatgtctaggtggcacagtgtggttggactggttggtttcctatcagttgcattccctgtatgtcttcagccaatttttttggtaatccaaggcctgatgtatataaacaaattcctttcttgatcatctaagcaatgaacacttaacagagtcaagcttggagaattcagttcctaccacaaggtccggaatggaggatttataactgggagacagaaggtatgctgaaaggtactcaaactgtcacttccttcacccccaggagcactgaagcagacactgattcctctgcagttgttgggcttttgagctacttccctcctggggagatgcgtgttaactgtttaatgactggcaatgccgtaacagtgagcaagcaatgtgaccttacaaatacatgtgcagaaatgcagatgagtgggcctaaagaatccagactcaacttacttctagtggtaatggctgtaggagagatggggagtaggagaagaaaagccaaaggcagactttagtctggtttataatgctttaatatttttttgaaggaagaaaaatgttcattacttaacgtaataattatttttaaaaagcagcctggcgggggggtattcatttttctgtggctgccataacaaagttcttcaaacttagtgtcttgagacaagacatttattttcttaaagttctggaggtcagaggtctgacacaggcctccctgggctaaaatccaggtgtcttcagagctgtgttcttttggatactgtagaggagaatacatttcctggccttttccacgttacagagactgcccatgttcctcgatccatggctccttttcggtcaccttccagccagcaacattgggctgactccttcaatggccatgtctctggttctttgtcttttgcctcctcctcttacttttaaggacccttgtgatttcattggtctcagctggatagctatcaagggtcactttaaggtcagctgactagcaaacctaattctatctgcaaccttaattcatataacctggcgtagtctcgattttattttaattttttaattgaattcagctttacagtatcttttgtagggggtaattttagcttctttctccgttgaaaacttcaagtaaggaaacacttatattgctagtgagtggccagctggagttgtaggtctaattctttttttttttttaagacggagttgtgctcttgtcacctaggctggagtgcaatggcatgatttctgctcactgcaacctccacctcctgtgttcaagcagttctgcctcagcctcctgagtagctgggattacaggtgcctgccaccatgcccagctaacttttgaatttttagtagagatggggtttcaccacgttggctaggctggtgtcgaactcctgacctgaggtgatccacctaccttggcctcccaaagtgctgagattacaggcatgagccactgtgcctggctggttgtaggcctaattctagcaatctcagcaactgtaggatttctctgcattggaggaagcaagactgaaggtcgtctggctttatggacaatgtgcttagaagttcatgccataccttaggtccagtcttgtgactgaaccaaccagacaggcctaggctctgccctaagtggtcagcctccgaggtggtagcacgcagggcctcacttcccactgcctctgtctatgggcatgtgctgtgtgccattctctccccttatcagtgggttcccagctgcctggtgtacaggagggttaagtagatacctgttgagtgattgtgaatgttttcattcacgggggcagatttgtgtcctactaacaccagacatgtcctgttttcagattacttctttttcaacatctgagtacctataacatctaaagaataacaggaaaatccacctgggtggccaaagtcaatgtaatgggcagaaagggcatgtggtagacttggaaatcagacatcttagactccaacacagggctcttccacttgctagccatggaacctcagactgggatccttgacttccttatctataaaatatggcttataactcaccctgtattatagatctgctgggaacatgatagaacgtctgaacagtgctggcttatagcaagtgttcagagatgtgtttcgttgtttttcttttttctttttttgagatggagtttcactcttgttgcccaggctggagtacagtggtacgatcttagctcaccacaagctctgcctcccgtttaaagcaattctcctgccttggcccctggagtagctgagattacaggcatgtgccaccacacccagctaatttttgtgtttttagtagagacggggtttctccatgttggtcaggctggcctcaaactcctgacctcaggtgatctgcctgccttggcctcccaaggtgttgggattacgggcatgagccactgcgtcaggcctattgtttttcctacgtaccgtgattgcttgctttcttctctgtcgatgtccctgccatctaaatgctgagtccccttgtctacattttgaggctcttctattatggaagagggctagagaggccatcagaatttggtttcactagcctttgatccttcctgtttaaggagctcagcatttagcttcacttccctgtcattcatcagaattcattctcagattggaattgtccagtcttagagtgatttttgtccccagtgacacttcccttatatccgtgctgacacaggttcaggagaccaggtcgagtcgaaatcctggctgttccgctttctaacaagctgcttcatctttctgtgcctcacacatctataaaatggagctgggcatctgtctccttcagttatggtgagaattaaaataaaaaacacaaagcacttctaagaaagtacaggagaggccgggcacgatggctgacgcctggaatcccagcactttgggaggcagaggctggcagatcacgaggtcaggagatggagaccatcctggctaacacagtgaaaccccgtctctactaaaaatacaaaaaaaattagccaggcatggtggtgggcctgtagtctcagctactcgggaggctgaggcaggagaatggtgtgaacccaggacgcagaggttgcagtgagccgagatcgagccactgcactccagcctgagcaacagagtgagactctgtctcaaaaaaaaaaaaaaaaaagtacaggacatacgtaggacccctgaacatttatccccctgctgccagtacgttacagcaaccaccaagtccacctctatcaggatggtgccaatttgtggggtttttttttttttttgagtcggagttttgctcttgtcgcccaggctggagtgtaatggcgtgatactggctcactgcaacctctacctcctgggttcaagcgattcttctgcctcagccccctgagtagctgggactacaggcacaccccaccctgcaggggttttttttttttgttttttttttttttttttttctgtattttcagtagagacagggtttcttcatgttggcctggttggtctcaatgtcctgaccttaggcaagccacccgccttggcctcccaaagtgctgggattacaggcatgagccatcacgcctggtgaatggtgtcattttgatgtactgagccatctcagtttttccagcaaccttccctcacctttgtggtcagctagaaggtcagttaacacatgggatgggaattcttgccaatgtccttcgtaaaagaagaacttctccttcactcacatgtcctgatacttcctcagcatttcattctagcctttctgtctccatccaccatctatcaatcatctatcatctagctatctatcgatttctcttttttggctttaattttgtcactttttcttctgtctgctatagaaatagcaaattttcttatgtaagaaaactctgaacgcgaggccaaagtagaattttccctgaaacagctaccttttccttgaaattgttctatatctaaaatcactaggtgaggagtaatagaaatgtagacatgagaagtgaaactgttttttttccttgtaaaagcttcattgtgccctttagaggataactctgtagtttgatatgataaaaataattatatgattatgctgagtgaggtggctcaagcctgtaatcccagcacttggggaggccaaggccggcggatcacttgaggttaggagttcgagaccagcccggccaacatggtgagacccccatctctgctacagatataaaaattggctgggcatggtggggtgcagctgtaatcccagctgctcaggaggctgaggcaggcgaatcgcttgaacccgggaagcagaggttgtagtgagctgagatcatgccactgtactccagcctgggtgacagagcaagactgtctcaaaaaagaataaaaatgaataaaaattatgtgattagagaggggaaaacaatcatttcttgtgcgctaatgccactcagcaggtgcttacactgtctggttcatccttacaatgactccatgttatcgccattttcagatgggtaactcaggtagaaatatgattccattagtttaaaaaaaaatacatagaagataagaaaaatcaccaaaaattcccagccacagtagatgtatctgtatttaactactctcctcgtgttgaatatttatcaggtttctcgttttcttttgtttttgttgtaagtggcactgcaggccagttgcggtcactcaaacctgtaatcccagcactttgggaggctgaggtgggcggatcacttgaggtcaggagtttaagattagcctggcccacatggtgaaaccctgtctctactgaaaataaaaaaaaaatcaggcatgttagcatgcacctgtggtcccagctacttgggaggctgggtcaggagaatcgccttgaacctgggaggtggaggttgcattcagtcgagaccatgctagtgtactccagtctgggcaacagagccacatctccaaaaaggtggcactgcagcaaacagcatccacatgtgtgcacagaatattgttctgttgtgtacctcagatggctttgttaggttagattccctgaagtggaatggccagggaatttaaaaagggttttgctcttgtcacctgggctggggtgcaatggcgtgatcttggctcactgcaacctccgacccccctgggttcaagcgattctcctgcctcaggctcctgagtagctgggattacaggtgcctgccactatgcctgggtaattttggtatttttaatagagatgtggttttgcggtgttggccaggctgttctaaaactcctggcctcaggtgttctgcccgtctcggcctcccaaagtgctgggattataggcctgagccacggtgcctggccaagtctgttttttaaatctggaaaatgggacttgttaacttctgtattgtcttttctgctgctttatccaactttgcaatctataagcttctgttactggaaaatggtgatggtaaagtaattgctttcttatgttccatcacagagggtagactgctagctctagtatttttcaatgctgctttttaagtgatagatgtataccattcagtaccaaccctgcaccctgggacatgcctccttgctgaaactaccatttatctttgtgaattcattattcgtttttccaacaaacttttattgaacatctaataagacctggacatttggctgaatgctggaagtgcaaagatgaaggaaagttgctttttggaaggatattagaatccaaaggtgaagcctgcacagtaagtaggccagtggtgggataagggatccattggcccaggaaattggagggacttggagaaggaccatctcacccgtccaaagaatggaggagtaagggaaggcttctggaaagaagttgtgttgaggctgtgtttggaaaggtgaataggagttaggccagtgaggaatggggtgaacaactgcaggaacttgagtgatactttggggtgaattctctctctctctctgtctgtctctctctgtctctgtttctgtctctctcactcacattttaggtaaagcagtgtttcttccccaggggtgattgtgtttgttacagtgtgatggagactggatactgcatctagcagatagatgctgtcaatcatcctacaatgtgcaggaccgtgcccacacaaagaatgacccgtccccaaatgtcaacagtattcaggctgagaaaccatgtactaaggcacaggacaagcatcgggttggataatggcagagaaaagtaccttacctccttccagaacctgagagtgtgtgactgtgagtgtgtgtgtgtgtgcacacacttgcgtaaagtgagaaaaatctggtgttttttcgaagtctgcctcgtttaggctctggactcctgctctctgttgactctgtccagagagtaagcgactcagcaggtgtgcctccccatgggcccccttcacggtgtcctcaccttgatttattagagcattttattcccccaacagtgtttatgacatccaaggacttggtggaaccatgaggaaatgagagtggacagtgagactactatcattcattttcactccccgtaaacatcttctgtttctgttttagaagacattgctaatcccctcatgcactggctttgcgaatttctttttcagcctgggtttgaaagcaaagtggtagtgactttttcctgatagctgctgaaaaggttccacagtatttggaccgctgcctgcttctaccctggagcacaaaagatccaggcgtagaaattggttctaacaatatccttttagagaacaccaaggggatgtgagtcactttccctttgatttaaaggcactgcgtccctcaaattcagagttagagggtgacatgtagttgatctttacttcccgggggcagaggaccataattaaatggctgtggaaacccagaagcagcctacagaaactcttaggagccctccgtctgggaggaatttttttttttttttttggtatatctgtgtttacagttctagaaaagtgttggttttgagggcaatggagacaggaatgaggagaaaatgtataaaggagaggttgctgtgagccgagattgcgtcactgcacttcagcctgggcgacaagagcgcaattctgtcaaaaataatattattctgttgtttcctaattgttgatttgtggtccatatatttggttccttaactaaattggagttcttaaaacaaatgttaagaacacaacatttaggcacacagtacttggattccagtagctttggataaattaataaaatccttccattttctcagttgtagaatgggaatagtacccaccttataggcttgctgtggggagtaagtgggataataaatgttaagtgcttttagctgtactgtacatacataatttctgtaagtactggctattttaaaaattattttaacactattctgatataggaagttaaaaaatagcacagaggggatccctgtgatttttactcacttttctacaagcatgactccttatataactacagtacaggatccaaaccaggaaacatgcctgggtacaatgtgagtgtataattccaggtaggtaaaataatggcccttattaggatgtctgcgtcctaatccgcggaaactatggatatgctttgttacatggaagaggaaaattaagattgcagatgaaattcaagttactgatcctgcgaagttaaaatcaggagattacccagggttatctggttgggcacagtgtaattgccaggattcctaaaagggggagagagagtcggatgagtcaggcagtgagatggcagcatgagaaggacaccgccacacattgctggctttgaaaatggagggaggcgggcatgagccacagaaagtaggcagcctctagaaggtggaaaaggcaatgagatggattctaccgtagagctaccagaagggaacacaccttgctgatgtcgttttactattttcttatttatttttgagacagggttttgctctcgcccaagctggagtgcagtggcgctatcatggctcactgcgatcctcccacctcaacctcctaagtagctgggactacagtgtgtaccatcacgcccggctaacttttttgtatttttagtagaggtggggtttcatcatgttgcccaggctggtctcaaacccctgggctcaagcggtcctccctccttggcctcccaatctgctgagattacaggaccctgctgatgtcttaatcttagccccttcagatcccagttggtcttctgactccagagctataaaagaataaatgtgtgttatttcaagccgtgaatttcttattaatgtgtcacatagcaatggaaaaataaacgttctatgccatttttatcacatgcgtaggttcatttaaccaccgccactactaaaatacaggactgttccatctgcaccgaggtctctctgtgctaccccttgaagtcacacttgccaccctccgcccttagcctttctttcagcctgtgaggaagcaaaacttttactcttcaggcatcacctcacgcgtcttttctgcctgggaggcactttttccagttttcctggcgaaatagtcatcttttaagttctctgacaacccctctctgagcatctaatcccaatcagaattccctcctaatgtaaactctcattatatcttttaactttatttcttagcacttatcatgctgtatggataatggtatatttgggtgagagtatttgtttctctttctccctaagtaggctggaaactgcatgagggcaaaaacttagctttactcaatgttttctcagcttcatgtacgtgactgtatacagagtctgagccgagaaaaccttccttgcatgtacgagcaaatgagagtattcaaggtacagaactgaaattttctctgggtttttaagtggaagagtacacaagcattataagcaattttacctgcatttactcaacagacttttgttttttatccccttcggtgtaggttgtcatactaaattggttcagattctgtatctgggggtagttagacttctgtgaactccaagtagacggttgaacatgactgaacttgcacagtggacacattgtgcatttgtttttaagtccctagctgtttccagaaatagtttggttaattcatactgataaaataaatccccgtaagagcattattccccaaagtgggcttcctttgccaaacctaattatctggagaaggtattgaagaagtcaacttacctcttggccaaatgctttctagaattattcaaccaaagacagcaggctgcacctaggggaagccaaacatctggatgaagaatgaaatatccagatgttttcaagtatctggatgtttctaaccatctgtttctcttggttattgacaaatgatccagctgttttgcagaagatggtataccttgcctaacagaagagagaagtaacattcttagaaaactttgacatcatctcatctgtactaacacaggatttctgtctttaattgaagccatgacttgatcacaaaaatgaaaatagcttcatgtgtttctgaagctgttgtcttgctttgggcgccagactgcacaggattttaggttaattgtcttgtttacaattagagtctgcattgtttgtagcttgattctatttataatgtactcacaccttaaccaatagcctcacagatggcatatgagaatactcatactcagtgctgctaaaaacagcctgctgcctgaacaccagagtgtcttttaaagcgtagaaaagttgggtacataaaatttctgttgcaaaaaggaatgtataggccttaattgaaaatgtatctttctggaacaggagttttagaagctgagtaccacccactcccttgctccacaattctcttttgtttaaggcaacacgtaggttcttagttttttaaatatatatatatacgtatatatatacgtatatatatgcgtatatatatacgtatatatgcgtatatatatacgtatatatgcgtatatatatacgtatatatgcgtatatatatacgtatatatacgtatatatatatgtgtgtatatatatatataaaaatatatttaaataatgttaaggctagagtagaatgacatcatgggaaggcttattgaaacttggagtggattcgtagtctgccacgagaatccttgtctgatgtttgtgggtgtgtaggactgaatttgaagtccttaaatggatgtcctaacagtgaataaagacgtggggcttgaatttatgtattatcttattactctgtcattttcttgagtggtacaccagagtgcatggaaaagtaaatgattggaagccgcgtggtagttaagggtgatgatgtaggagtgagaacacaggcttggtgcctggcgtcagcacacacatcacaggccctccctgtcagtggctgtcgtctgttagtgtttccagcacagctctaaagagcgacgcttggaggctggggagagggggatggagaggcatatgattctgttgacatttagtgacatgcgctcttcccaaccaaacagatgcaaatggattttagttgtgagtggttgtttaacacctgcataagtgacagacctgcagagacaggttgtggatggaacgcaaattcaaatcagtgcatgagaacagcagctaaagtggacagacccaaatgttttgcctaaatatttggctcctagttgtacaaaaagccaaatggtttcaatttcatcctatataaaccagatgattgtgtatttacttctcacttgccctgccagggggatggttggtggggggaagacaaggacaaacaattcgaaagagcaaatgagccaaaatccatctggattttgttaatgctgattatatagtttcttctgttgtttttaatgtcttccaagccttctgtgtattagccagcattaaggggaaaaaatgacattttgactttgactccctttgtaatgtaatgcattgttatgtatttctgaagtttttcttaaggaaatagtatatgataataatgactagcactcactgagtgttcgtgatcgccaggatcaggccaaaggttttcacgcttgtgcctttttaaacttctcaacaacccagtgagatagatgttattagcccaatttaaggatggggaaagtggggattcacagatgaagtaacttgcccctagcatcgtacagtcagtgagtgtgagaggtacaattcaaacccaggtagacctgaattaaatcttctgaagcaactcttcatcaccaggtgtggctacctccaatgattactttgtttttatgattatcaacaaagttactctgtggagcaggggcaggcaaacattttctgtaagggagagacagtattttatgctttgcagtacagtcttttgcaactgttccactttgtcaccacagcacaggagcagccatggacgctacgtaagaaaatgagtatgggagtgtttcaattaaaattatgtatggacatggaaacttgaactttttatgattttcatgatcacaacttactctgatctctttcaaccatttaaaaatatgaaaaccattcttagtttacaagccctacaaacactggcattgggttaggtttggatgatgggccattgcactccagcctgggtgacagaatgagactctgtctcaaaaagaagaaaataaaacaggcgttccttacctacagcctgctatgatttggggttcttgtatttttttttgtttgtttgtttgagacggagtcttgctctgttgcccaggctggagtacagtggcacgatctcagctcactacatctctgcctcccgggttcacgccattctcctgcctcagcctcctgagtaggtgggactacaggcccccgccaccatgcccggctaatttttttatttttagtagaaacggggtttcaccatgttagccaggatggtctcgatctcctgacctcatgatctgtcagcctcagcctcctaaagtgctgggattacaggcgtgagccactgcgcccggccggggatcttgtattaatagtagggagacagtaagcaagcaaggctcagttaatgataaattgttatcaggagacccagcagtttctgctttttctaccctcctctttgagctctatttaaactaataggttactgggtttgaacatgccatgcagtgggaagaggcgggaaccccactgagctgtcctctaagtgaatcatgcccactatttggttgtgaggctgtggactttacttttcacgcatggcattgaaagaacagggaagggtggattccccatctcctcttcctctttggaatcaggaaaacatgtttctattctaaatgttctttgataaataagattgcatgttcctggctcctgtaacatatattttctttttcctttgtccggcatacttgactaattgtagagctttttgagcctaaaactggataggaacccagtgcatgcactcttaaggactcagaggcctgctcaaggttaagtgcagtatggtctgaataataagcatagatgcccctttactgagcagcagctgggtgctgggcactgtgctaggcatttttggatgcattttcctcctccaacttcactttcccctatgagattatttcctctgtgttagagacaagaaaaatcaatttacaggtagtttaagtgacttgttcaaggctacagtaagcttgaagtggcaaggatgggatttgaacgtctgtctgcttgattccaagaccgtggcctttgtcattcaggtcatgctgctttcctcaaggcaaggaactgaggttttctgttggcagtgaggtggtggcttcttgtttccctggtcttagatactgctcaactcacagttgaaatgtagaagtgaaaagtcagacagcagcaggtgttgctgggaatgtggagaagttggaaccctcacacaccattggtggggatgtaaaatggtacagctaacttggaaaacagtcggcggttcctccaatagtcaagagttcccatatgacctagcaattccactcctaggtacgtatcaaagagaaatgaaaacatggaccaagacttgtacatgaatgttaatagctgcattgttcttaatagccaataggtggaaaaaaccctaatgtccatcaatggacaaatggataaatatgttgtggtaaatgcgtgtaatggaatattccattttatattcataaaaatggacaaagtcctgaggcattctataatgtgagtgaacctggtaaacatgaggctaagtgaaagaagttagttacaaaagtccacatatggtgagattccgttctgtgatatgtccagaacagagaaatttagagatagaaaatagatgagtgatgactcagggctgggggagttgggggtgggcgggataggaggggtagaggtgaaggtgatgaaaatgttttgcaattgtctgtgttggttgcacaactctaaatgtactaaaaatcattgaattatacaattttaaatgggtgaatcgtatggtatgtcaattatatctcaataaagctgttaaaaaatctgaaagtgtcaattaatctttgctcccagagaaaaccactcagggcccgagctgctcatgggcacaaaaacccattcctcagattccttggccatgctggaagcctggcttgtgtgagagcctcaagtctctgtaacagcctgggagtgttggtcccgtcacagggctgtggcagcctttaaagctagaaggcactgctcagaggaactggttcctttgaatccttttccgtcaccatgcaaatgtttacaagctctaatcaggagaaatgaaaaatcacatgtctaattttaaatatgttgcctctgatcacaggtgttgttaaaacagctcttttatgactttataaatactcagatttattttgaagcaatgtttcattattcctatactatgattaaatattgagactattgcttttccaattgttctattgcagtatttaatgagtgcaattaaatggaaaaattgcctttttaactggtgatagtccattagtgtctctgtctcttcaggaaagaaaagaagtgaattattagaatgacaaatgaggcaaagttaccaccgtgatggagaggtgcgatttccctccacataatcttcagttagtgatctctgtaagagaatgtttttcaaaaggctaatagagaagtaatgagatcagaaggaggtcaacccggccttctccgtttggcagcttgattaatttatttctccttcttggagattgctgcaaggggcttttgtcaccctgtgtttttcatgggactgtaacctgagtgactgctgatatattagccttgcaggcaaggaagcaagtccgttgccctggaatggaaggcataggagttaagggtttgtttgcttttgcaacttgaacacactcattgggagctttggataatgacaacaatgatgatgattttaagagttaatcaaattaaaggctatgaaatgatgcccactgtggatcctgtgcctggtgctcagcacatacaacatcatttcattttcacagcccttgtgacatgatagggctcttttgcagatgaggaaatgcaggctcagagttatctagcattgtacccttaagcagaagggggaggtaggagtgaatctctgtctgcctctaaactcttgagctcccctccagaagtccagggctcttagaaactttgtactcaaccattaaattgttgccattgtgctgaggagcaaggaaactgggatcacacagctagatcacagtgggggaacctgaattatggggatgctcacaaaagggcaaaacacaacggttgctgtcatttgatgctttatgttaagtgtgcatatgctcagttgcagaaacctaaattgctaaattgcaaggctgtatatgatatgccaatttggcatattctgtctttttatattctgccacccctatcatacttaggaaaatgccaggttgtaatcattcactgggagaaacaaggggttgaacgttgttatcgcgcaaaggaagctgggcctagtaaaggaatgtaaatactaaaatgccagcatcactgttacttactgtgtttctctggatgtattacttaacctctctggctttatttctgcctgccctccccccgccccccccccccgcaatgcctcaatctgtggcagagttgttacattattgaaaaagaacataaagcatattttctggcatacagcatatgtttaatttataatttttgtttttatcattaaaagcaacagattgctgtattcttgcctgccactgacatggacttaattgtttcatttagacatttaagtgggcaatacacttaaaatgcagatataactttaattgtcaaaacatgcttattttaggaaatgtgtttctccagtaaagctcagtatctggggctttttcggttgtattctatatgaatcttgaatactgaagtttctcaccatggagatgacaaacacataaaatgtttactttgcaaactgaatttctcttgctgctttttctgaagttccccagaggctcatcatcatcaataccatcaattaatagtcatccttggcttcctcgatcctcagcactgcgctgggcactgccccccaggagcatccatgcacctcaaatcctgaccttgtgactttcaagtccctaagtgaccccacactgaagaatctggtgaaggccatccaagcccagagttcatttaagtggcagcgatgggaccaaattataggccaggtctgtcttatgaaagatgataaatggatgtgtcatatcgggaaagaaatcactctgtcatcatatgacaggctggcttgatttctttgcaccagtgtccctaaaagttgggatgggggtgtgaagcgtgccagctttcaaagccagttgtcactccattttgtgctgtacctccccagttatgaatctggggcatcttcactggactctccaagccccagtaccctcagtgtggaaggagaaagcatgacccactgggcaggacacagaaggcttctgtgagaatgaagctctatcatgcttgtagaacatggagcgctcagcaaatacaaatcacagcccatctcctccaatcatttggggtattaggattcccttcactccaactcccactggaaaacctctttgccatgacacagagattccacaatcttctatttttatttaaaaatttttttaaagagtgatctttggttttctcagtagatgctttcctctgaatagcaagcatatagatagtcttctccttcagacccccgaccatggctatattatttagtctacagtggttctttgtacaaagtgcttctgcaaagctcttagagcacccagagctggctttggaaagcaagacattaggaatgagctagcctgaatgagtcctgatttttttttttttttttttttttttttgagatgatcttcttctgttgcccaggctggagtacagttgtacaatcttggctcatggcaacctcaaacttctgggctcaagccagccgcccatctcagctacttagtagcttggattatgggtttgtaccaccttgcctggctaatttgtatttttagtagagatgacattttgccatgttggccaggctggtcttgaactcctggcctcatgtgattgccccaacctcagcctcccaaagtgttgggattataggtgtgagcctctgtacctgagttctgatttcttaaatttcacagtcccttacctgtaactcaaattcccgaaccttcaaaaaacaacaagtggcagcaaaacttgatttggaattgtcgtggtcttgtttataatcgtcatttttcttgtcatgtgatttgatgtttgggtatatgttaacacctcactagggatatttcatagcatatgattgatgtaagtcgtaaaaaatttagaatccttcaacacatacttggattttagatgaagaatcatagatttttatttctgtggctttggatgagctgtttaattttcatttcaagttgctggtaagatgatgatgataatagagataatcctgtaagaatgctgcaaagggttagtactttattcttgcaacaagtatttattgtaggcctgtattcaaaggagaataagataaataagatcgaatgtggaaattagatgaatccggagttagtgcaatgaaagttactaagagagaacagaaatactcttgataatgctgatgtgactggacttttgacaagcagtctgggacttctgctgaaaagtgctcttgaagccaagcaaaatcatttccacaccctcagcacctccagtttttcctggccttggtctcagggtggttgaccttttgccgatgtgtttttcttttttcttttcttttgttttcttttcttttctcttctcttcttttcttttctaacagtcttgctctgtcttccaggctggagtgcagtggtgcgatctcagctcactgcagcctctgccccctgggttgaagcgattctcctgcctcagcctcccgagtacctgggactacaggctcccatcaccatgacaggctgattttcttttttttcgtaggacgaggtttcagcatgttcgccaggctggtcttggattcctgatctcacatgattcaccaaccttggcctcccaaagtgctgggattacaggtgtgagctaccgcacccagcctgctgatatatttttaattatcataagaaacagttaaagtgaaattgcaaccccatggtatcggtggactgaacgtttggttctcatttccttgagatggtagtttcctcctctggctacttttgtccagccagttctcctctgtgggcatttggggaagggctctctgatagaaatatgaaatgatgagggatgcaaaaaacgtggtttgtttcttagaacaacctccaccacgaaggttccagacagagtgaaatttctgtatttgctgaccctgtcgccagtagcctggaataaacagcaaaaatagttcttgaggcttcgtggcaaatgtgacctacctttgtagttcttgggtaggtgtgtgactgtggcctatgaggccaagttgcaaggtctttggatgaactttgtggcatctggcaatgtccccagtgcaacctatgtaaaatatagcagtttcctgcacacgcttaagggaagaaaccgttgtggggaagcgtgctctgttattcttgccaatgtagccaacatatacatggggaggtctgttttatgttttatgtttgatggttttttctttttctttcttttttttttttttgagacagggccttgctttgtcaccctggctcaagtgcagtggtagaatcatagctcactgcagcctcaaactctttggctccagtgattctcccacctcaacctcccaagtagctgggactacaggcgtgtaccaccatgaccagctaatcttttagtttttgtagagacaagttcttgctatgttgcccacagtaacatagtaagtctcaaattcctggcctcaagcgatcctccagccttgtcctcccaaagtactggattacaggcatgagtcactgcctggtgctttctttttgtctttttctaataaccattgctatagatggttgtccttaacgcgtaaatgtttaaaatacctaaatgcctaaacgtttgaaaacattccttaaaaattgaagttatagcatactaacaagtgttcatttttataattgctgatttaacttaataaaaaccaataactataaatatccttaatgccactgaattgttcacttaaagtggttaaaatgataaattttgttacgtatattttaccacaaattaaagaaaattaatatttccaacaagccaaagctctatgtaaatgtcctaaattaatgtgtttaaagagaaaatttcaccagtgataattttttttttttttcccctgagaaagtcttgctctgttgccaggctatagtgcactggcgtgatctcagctcactacaatctctgcctcctgggttcaagcaattctcctgcctcagcctcccgagtaggtgagactacaggcgcatgccaccaccgccagctaatttttgtatttttagtggagacgaggtttcaccgtgttggccgggatgctctcgatcttttgacctcgtgatccgcccgccttggcctcccatagtgctgggattataggcgtgaaccaccgtgcccggcagggagtaacatttctatgcaactatatgtgggtgtatttttctgaacatgtcagtgaagtttaaatattcatctcacttctttcagtcaccctcaaaggggaatttaatttacgacttcatttgtactttcaaacttcctcctggaaacagaagaaaataaaattagatttttgtaagctgagatgatatgcatgttcttattttcaatacagttagtctctccactttatttttaaacacaacctcataatacaaataatctagtcttttctggagcagtctatttattcagacaggtggaagttgatgctaaagattggcgttaaattgagtaaaccattcatgtagtaaataagataatttgtttctgccccccaaaagattaaaatatagatttttttcaaagtctgtttttttaacacctacggtccctgaatatgttcgattgaggtttgtgtctgtaatttggaacggctttttgttgcaactaaaatattcatttgcagaaattatcactgagggtgttagcttcttcatgcttgcgtttcttgcatttgttactaaataaaatatttagaagtcacgtcgattttcaaaatgatagttaaggatgaaggtaatattggcatatttatttttatctgtgtaatttttgcaacttataaccccttcaggtccaaatgaaacaggcaaccaggtaataaaccaattacattctaatacagattacttcatgacagtgtcttattttccagtttatatgtaggtgagattctttggagaccgtcttcgtaatatagctagtttttgtccattcattttgctttgacttccttgtataggtacaaaggtgtaagtaggagagtctaccaggcagcacacagacgtggccctgtaaccacccttgtgtaaaatcagagtaatcctccctatccttgcttatttcactgggttcatgggtgatgactgtaaatgacacaggagacagggaaagagttttgttatcctgatacacacattcttaaatgcctctagctgtgtagacattggtttgtccatattaatagtattttacgaagtgccagttgtgtgcctgctttgtggcatatgcattggcattcattgctttatttaattcttccaacaacgtgtcagatgtctgttcaaattattcccccctttacagacacagaaactaagatttagagaggttatgcaatgtgccaacagggagaagttggagctggaatttgaaccaggctagctgactccaaagctgtgtcctcaagcagtacatcagagccgaggaaggtcaagtttggaacgccatttagctgctctcagggagtctgattactgtttctctgttgaggctcagctcaagccttccctgggccatgaaagacaacttaggtttgggtgtcctgtgtttgtaccttgttttgtgcccacctacatcctgggttatgtctttccccaccccaagccttttttgccatctctttttcccagaaagactggaaacttgcctaaagagacagaatcccagatcccagatggatctactattttagaatctctgcttccgcatttctaaaatccttcccagagaattatttgactagttaaagcttaagaaacaccccagtggattatgagtgccttctagccaagaatgggtatttcctctgtgcaatctgagggcacgggacactcctccagcggagtagcctgtgatttgtatgggctgcatgaattcctgcactaacaaggtaaaagaaggatgttaaagaaaacccgagatcttttgggtacatgctataaggtgaaaggcttattccatttgctcaagaacaaacatccatttgtccaccccaagtatttatatagttcaattaagcgggcaggtaaactgattttttgggtggttaatgatctgatgattttcctctctgtcattgtgattggatatgataatctgagagttgcccaaattagtgcctttactgtagttataataatgtcatgatgactgaggatcactgagtgtgccttttgctctgttaagtgtgcattcagaactttactaacatgggttccacaggaaatattagccccattttgcaaatgaagaggctgaggctcagaaatttaaaattgcttcatgtcgcacagttcagtgtaaagttgcaatgcaaactaagatgtttccgttgcttataatcttaactataataatcataaaccatgttctgttgctcagaacccttgtacttataatataaaacaatctttttaaccaagattcttcgcttgggtattctgagtagcatggaagagcattatacttttttttttttttttttttttttgagacagagtctagctctgtcacccaggcctggagtgcagtggtgtgatctcggcacactgcaaccttcgcctcccaggttcaggcgattctcctgcctcagcctcctgggtagctgggactacaggagcatactcccacacccaggtaatttttcatttttggtagagacggcgtttcaccgtgttggccaggcttgtctcaacccctgagctcaggtgatccgcctgccttggcctgccaaagtgctgggattacagacatgagccaccaaacctggtcaattttctatggtgtgtgttacattttttaaaattttattttaatgtttatatagaaaaagttgccttatcaaccattataatcatggtatttagtgagtgtaatctgttctgatgtaatacttagtttaactggtaaaaaatattttgacagaatttaagattagttctttttgctttgtccgtcaatgtgaaataatcagtatatcatatttatagaattctgctaaaacatgcatatatacataaacagatattcatcttaattgatgttaattgagatataggagtacttcattaagtctccagaatacatacttcataagcaggaggcatatatgtttgtatatatgtatgtacatagacttgatacacatgaaataaaatttcaaatggttcctctgttcagcaaacgtgacccaaagttttggcttatttggcgttttgttttcttgaagacatacttgaattttaaatagttaatccatttaagaagtttcatttaaggtactgttaaaaagaaaaaacacagaacaacacagtgagagcagaaaaggtatcatctcctccccctcttcttctcttttagaaaccttgcgtgatccactgatggtaaatatttcatgtactttgcatatcagcctgagttccttttgtgaagtcaggtaaatggaatgtaaatcccctcgtcctccagacagtaaaacggcattatttgatgttacatcgcataaagatgcagatttgattccccctttactcacactataaaaacaaagtttttaaagtggttagccatacctggaaatgtaaatgcattcgcctaatgtaatgccaaagaaaaattaagacaaatgataccacatcgctgccacaaactgcggctcgtacaaaattcactttagttattatgctgtgaatacgggctctcaccctcctccgtgaatgcacaatttatgttgaatgcaacatgaatcattttaatagaccaagcaaaaagtccccaaagtcgattttcaaattatgaaccttggaacagaatataacaacagcgaacaacaaatagttcagactttactctgagctatgagtgaaccattaaagatacagcaagcactttcggtgaggtgttacacaattcatagcctaatggcaaaaatatcagaaatggggtattttttaatgctgtttttccagccatcattctgttcaattattttcacatttgtgtaatcaagatattcccaaacagaacatagagttgtgtattgttgggaactaattatatgtattataaatccaagaattaatttaaatgacccagtttccacagagaaaaagccacattgtttttaaatagctaactaaacaaaatgctaacccatatgggagaaatttccaaagaattaaaaccacccaccaggaaaatgggaaagtctcccctccacacacacacacacgcacacacacacacacacacacacatacacacacacacacacacacacaaaatcaccaaatcacacctgaacaagaggaagaaaattaaactcattgaggagataccatctttttttaaaaaaaaaaaaaaggcagcaaaatgtgagatgggcgtttattatgagatacacgaagacagagaccagaggttccccaagtagcccctggacctgcagtgtcagcatcacctggtagcttgttagacatagaaattcttgggctttattccacacataatgaatcagaagcttgtggggtggggcctgcagtctgaggtttattttttctaaaactttaagttccagggtacatgtgtaagatgtgcaagtttgttacataggtaatcatctgccacggtggtttgctgcagagatcaacttatcacctggatatgaagcccagcgtccattagctgttgttgctgatgctcttcccaccacctgcaagccccagtgtgtgttatccgcctccaccgtgtgtccatgtgttctcatcatgcagctcccacttataaacgagagcatgcagtgtttggttttcagtttctgcataagtttgcctaggataacggcttccagctccatccatgtccctgcagaggacatgatctctttcctttttatgattatataatattccatggtatatatgtaccatattttcttcatcctatcatttatgagcatttggagtgattccgtgtccttgctattgtgaaataccatttgacccagcaatcccattactgggtatgtaaccaaaggaatagaaatgattgtattataaaggtacatgcacatgtatgttgactgcagcagttttcacagtagaaaagacatggaattcacccaatccgaattttaacaagtcttccatgtgattctgagacagactcatgttcgtgtggttctggctctgcagaactgaggtgggccccaaaacttgcgtttctaaaaggtactagctgagcatgatgactcacatttgtaatcccaccactttgtgaggccgaggcgggtggatcgcttgaggccaggagtttgagaccagccttgccaacatggtgaaactccatctctactaaaaatataaaaatttgccgggtgtagtggtgcacacctgtagtcccagctatttggaaggctggggcaggagaatcgcttgaacctgggaggcagatgttgcagtgagccgagatcaggccactgcactccaacctgggtgacagagccagagtctgtctcaaaaaacgaaaaacaaaaaaaaccaaaagactaaatgtataaaaggtacccaggtgatgttgatgctacttgtcttggccaatgaaatgaaaagcctacaggccaggcatggtggctcatgcctgtgatccacaactttgggaggctgaggcaggcagatcacctgaagtcaagaattcaaaaccagcctgaccaacatggtgaaaccccatccctactaaaaatacaaaaataacaccaaaaaaaaaaaaaaaaaccacaacaaattagccaggtgtggtgatgtggcctatagtcccagctatttgggaggctgaggcaggagaatctcttgaatccaggaggtgaacgttgcagtgagccaagatctcaccactgcactctagcctgaacttcagagagagactatgtctcaaaaaaaaaaaaaaaaaaaagcctacagttgacaggcagataacagagggagcaaaggagtcttgtggaagacaatagggagtgttgaggacctgtcaaacaacacagtccccatctgtactttgggaggtaaggacttcttagttccagctgcctgttgccatgggggaacatagacccagagctgccatcttttctaatttttttaaaaattagaggctaaaagttttggcttataaaaatggtatttcctgagtttttacaattatagtattaagatattcctaggtttttgtttgttttcgagacgaagtttcgctctcatttcccaggatggagtgcagtggtgcaatctcctccgcctcccagtttaagccattctcctgcctcagcctcctgagtagctgggattacaggcgcccgccaccatgcccggctaattttttgtattttttagtacagacggggtttcagcatgttggccaggctggtctcaaactcctgacctcacgtgatccacccgccttggcctcctaaagggttgggattacaggtgtcagctagtgcacctgaccctaggataatcttaattttaagtagctggtaactcataaatttttaaacactctgcagttcaaagaaaacatgtttgtggtaggtagccagtttataacctgtgtaagactgtgttattagcaaatccctcaatgtgttgaccaagagtgggtaggaatcctgcagacagaatcttttgaaggtggtttgtttttttattcctttataagtacagttgtagatttacaaagtaattgagtatatagtacataaggtcttgtgtacccaccgatcgcaattgagcatatagtacatgctgtcctgtgtacccactgatccctggtcctgcccctggtatgagggtattaacatcttgcattagtgtggcacatttgctacaattaataaaccaatatcgatacattattaactagtctatagtttacatgaggggctgctgcttgtgttgtacattctataggtttgttcaatgcataatgacaggtgtctgtcatttcattatggagtgaaaccattccaatttcatacagcgtagtttcacgcctctaaaagtcccctgaaagtgttattaaaagtactatctggccatgtcctcatttccccagcaaagtccttctgagaatttaggcgctttaggctagaggatctcagtgctcagaatgaaatatccctgtactccaagatgcctccagcaattataattgaatcttgaagctagagtttcttggctatcctatttcccttttgtttccaccatgaagaagtggagagccgtgtgacctcagtggtagagctgatgtagaagcgccctctctgttcctggcagtgcctgtcctgctaacctcgtgtctcttgctggggtcttcatcagtaagagacctcacaagatgctttatcaggtcacttggcaaccaagctgatgaggatagcagtttcttttgttcttttaaaacatatataaaattatttttatcaaacatgacagatcaaaagccttctggaaaggagagatggtaactaatttaggcagtgtcttttgctttcacatggtgtacccagtactattaatatgaatttatcacatggaaacaaacttttaaaaaaattaattttgtgaattaaataaagcagcatgcaaatttactatcgtattcagcaaccaaaattttatcacttgcctgatactgcctagtgagcaggtggaaatgtagacaccaacaccctcatggattcccagctgctgagagtttgaatagtatgtgaagtctgtagagacaaaattgttgttttccccagttgtaaagtgtgcaatattatccttgcaaaattgtctgtttattttttttgcccttttgggggacaaaatgtctttatgttaaattgttttattattgttatctttatggagttaagggcacataaaatattcttacagagagaaattctgtagtttccacaagtaaccagagaattgttcaaggcagagaattattttttcaatgcctattttctcctgaattttctgacggagttagagataggaaaataccataatctgctataaattcagttgaaaaatagaaatagtgagaaatccaggttgtgctctgtcgtaatttaagcctaatatgtgattgtctacatgtttacaagttaccgcctttttatttcttctctttttctgttttcttcttccatttttatgttttgctatgccattcattcattctattcttttcatttctttttctttttgtaaaaattgtacagagtttaaagttagtcaggtatgtctattaaatttttacgtaaaaagttaaagcagccctcagcatcaacttcttcttcatttctaactcatttagtgaattcagttggtctttatatatgtagctttaagtaattgcatgtaaactgttacttcttcattttctagtcttagatattatctgtaggtttttcaataagaaggaaatttagcttccttctactttggtgccccatgatgatgtgcatcttttttatttctgcatcatatccatatagtgatatcatgtataatgatgtttaagaagacagttttttttgtttaaattgttataaataagtaagtgtatgcaccactatgccatgtagcatatcaagattatttttctttcctgcaccttattttttccctggagttaatactcatctttttttagaaatttgctgagtttgtgatgtacctatcattcaacctcaaactttcatgtgattgtctaaatctcagttccttttattagaaaaaaaaaaaaaaacaactcccctggagcctttgtaccttctgcagtttggggttgttgtcctttttgcttggtgcacaggaatacttggtgatgttctttttaaaactgccctcacattgtatcctggaaagttcatttacctgtacccggagttggaacttctcttccacatcttttcctgtattggtttggttattgttttgtgggagcatgtcttgtagtagctttctgaaaaaggatgatagaatatgtgtgtgtgtctgtgtgtgtgtatttcaggtttcaaaatgtttctgttccatcctcattttattcattgttagggatagaattacagatttaaaatcaattttgcttcagagttttaaattctattttgtggctttctgtgttgttctcgggaagtacaaacccttgtgaccgctgttctctttcatttctatctgcttctctcttgggagtacaatgggaggcatatcatcaaccccttgctgctatccaaataggagactgttccctttcaagagaattttaggtattcagatcctagacctcccagatggcctcataagtatttttatcctctatttatctttgtctttgtgttactttcagggatagttcttctagtctttccatggatttggtgggggggggggggacgtttctatttcctttatgtttgataacattctattcttgtttcatggatgatgttactcttttaactctctgatgttaatgataattgttttaatttttcttttctgtttagtttctatcttctcaaaattgttttcatttcttttggtaattgtgtttgatgatagtctttttttttttttgagatggagtcttactgtgtcacctaggctggagtgcagtggtgtgatcctgcctaactgcaacctccacctcccaggttcaagtgactgtcctgccttagcctcccaagtcgctgggactacatgtgcgtgtcaccaagccgaactaatttatttttattttttgtatttttagtagagatgaagtgtttaccctgttggccaggctggtcatgaactcctgacctcaggtgatctgcccatctcagcctcccaatgtgctaggattacaggcatgaaccaccacacctagcctcttgataaagtctttccccaaatgttctgatctgtggatgtctgtttctatctaagtagaattcaaagttactgctgccaactcttagcacatggccacggccagttaactgtggactcctctgaaggatgatctggctggactattttttgggaaaaccactgtgtttgaatgtttgcatgtgtcctgttggcagaacaaatatcccacagaaggatcttcttatcttctgcttggggaaggtgtagctctgactgctagagttctagagccaagtgagggggagagttctgagtctctgcattcagtaggtaaacatttacaaagtctgtgttttcagtatcatgccactgttctcacctgtttatgttctcttctgataataaacttctgtcatttttctggagttatgaaatgatggtatcctgctgggctgagtggggagggattctcaagctgtacatagctgacacacaggtttctaaaaggttgtctttcaaccccattttcagaagtaccaggttccacattttctgagcctttgctggctctctgataggaattgtgttacttctcagctgtccccatggctagcttaagactcagctctcttaagtcacttcctagttgtccatctgctttccagcatccaactgtaatttttttttttttaagagaaatgaagtctcattttgtttcccaggctggtctcactgtaattcctgggctcaagttacctctcaccttggcctcccaaactgctgggattataggcatgaatcgctgtgcctggcctcaactttaaatttttatattgaataatctttgatttgtattgtcatgttgttttatagcagttactgctgttttagtgtgatttgggatgaaaattttaaaaaatcaatatgtataatccaccatctttgttccttttatttttatgttactcattcttttaagcttgtcttagacgtgagtattatgttttattttgctgggagaacaatttgggaaaatttgagcagcaaaccataagtttcttggtgtctgtgtacttggagctctgaatcactattgtcactgagggagtggacaggaagtgatgctgagataagtctagatgggataggtgggcaacatgcaggagaaacctcctgggaaaggtgagcaagagcacacaggtgagacatagcatcgagtgtggaaacctccatgggtggcaggtcagtgttgctgagggatgtggacatgtctgaggccaaatagatgagtccctattgggttttgcctctccacaatctagaggaatatttatggaaggttaacagggcatggtggtgcacacctgtaattctagcacattgggaggctgaggtgagaggattgcttgtcttacaggagttgaagactagccttggcaacatagcaagacctcatctctacttggaaaaaaaaaattagctgggcatggtggtgctcacctatagtaccaggtacttcggaggctgaggcagcagaatggcttgagcctgggagatcaaggctacagtgagctgcaattgtgccactgcactctaatttaggcagcagaatgagactatgtctcaagaaaatgttcaagaagaaatacaaactattgaaaaaggaaggctgaatgctttatcagaaaactgtatttggaggggacctttctggggtcttttagtcagggtacataagtgtcagctgctacgacaaacaacttgcaacgtctcattatcttcatacaacaaacgctgatttgttcctttcattacatatccagtgtgagttggctggaaggtccaccctacacaaccactcgtgaaggcagacttgaaggggactccactgtcttggagctacactctaaaacaaatagcctccaaagtcaaggactctgtaacaggatgaagcagcattttttatgggcaggtttgcacgtggcatttgttgcttccatcaacattccactggcgagagtgagtccctggcccctatgtaattatgagggaggctgagatgtgagaagcacatgggtgttgggagagcactaaaggtctctagcccagaagcatgacttccagccaagtgagacagggaagcccagaaaaatgtgtcacagaacttatggcatcagaatctgattcccaggcatgctttccaccatatgcatagacatttgcaccccagggatagcaccattactcccaaaaattgcaggtttgaaagggtacctaaaaacaagccaccagattgtcccattccactatcattctgccatcaacaccgaggtgtcggagtagcaggagagccacatatttcttagtgaggggacccagaatgatcccttttgtgctagaggatctgagttcatttcatgaaactgaagcatcttcttggagatataagctcaccttgggataggcccttgcagatgacaataaaggtattttggcacataaaaaaactgctcagcacaccttgtatttgtatttcctttgacgtgaaccatggccatccagtaggccacgcaacattcccactgccatgttggcttgtttttcttttgttttcttgtcaacataagcctcatgagacaacagcaggatgcaagattgtacaatgacaccatgactctgctttctgggtgtcctctgtgggctctcagcagtgtccccgatgtggagggtcttcttattctgtgtgtgtgccctctgctgttgaaagttgcctgtcacccatgatgctgtgctgattgagcaaactaatccataacccaccgccacgttcctcgcctacttgcttctaggcacattaaacggtcagtgcacaggtcctcatttttctcatgcttccatttccatattctcaatcaatcactgatggccagctgtcaacaggcaccatttttggtgggacctgaagatgtatatcccttgttttcagattcctcgcctctcatcatgtaaggtgatgctctgagctgggtcttaaagcttctgggcacagccccccttgagtcttcattatggcaaatctagtgcaggtgctgagaggcggtaactctttaaagggacaggatatggaaacgtggcttcatggacagtattttagtatatttctgtaaatagcacatgtgctagatagcagatttgtgtatggatatgcacccggctagggacctctttaatggtcattcatttgggagatgacctttggttcctaaactggtggacataccaaggactaaaggagtgacttgctctcagttctttgtcattcagctgctttaatattaatatgacacccgttttgggcttgaaaagttttccttctgctgagaaatgatgatggtgacaatgatgacaatgacgatgacccttggttggagcaatgtagtctaaatgtggttgcatcatcttctttcttcctttgccttcctcccttgctctttttctgcccctcatgccggctccttcctcccacatcaccccacatttttttttctttctcctcaccatcaagaaatgttccagaatgccattattcttcgtcaccacggtcaggtatatcatcctaagggcagagggtgaaggtgcgtaattagtgtttcaccagactgagcatcatcctcgggcaggtgcaggggagaatggctggtatttatgagtgaatggcagcgttttgacaggatgatgaataaatatgctgggcccagaggactccaggtgataagcatttctttgtggtctggtaagtgatagcacccattgcttaatttctctaaaatctgcatttgtcaattttgtatttttttatttgaaaggtatttgcttaaataaataggccatataaatctagctcccaatgtccattttcaaatgatttccagcaaggaagatggaattaccacgaggaacctgttctcttatgtttctgcttagatggctgggtctataccagggtttatttaaatgaacacaggaaatgccattcacctttaccatgaatgggaatctttgcctgtgactctatcgtgtgaattagcagagcttggctattattcccctacttcggtagatactggctgtacagaagggaaccccagtttcaatgagtacctatgtgctgggcacttagctggtttttacacacatacttcatttgaagggaaggaattgactgaaaagaattctccattccaacttcccaagtcagttgccatttggccctgataaagctgtactttctcacttgttccttatttaaaatagagaaaagtgcatcaagctcttgttaatctgtcaggccttcctaagatgtctgaagaagttagtttggtgaacatgggcttcagggtcagactgcttgtgttccattcttgatcctatcacttccttgctgcgggaactctggaaagtcacttaacctctctgagcaagcttccatttttccaggtgaaaacgggagtttagcctagtccccacttgataagatggttgtggaaagtattgtgcgtcatggacctaaagtacctaggagattgtcctggatgtcgttttctcataaagttgactatggctattggtggtactagtatgactgtcaagtcgatcaggtggctgaggagcagtacatgggggtatacagagtgcaggcctcagaactgcagaacatctgcacaatctccagcaagctaacctctctggacatcgtattcctcatctataaaagggagacttcaatcttatttaatggcaaaagtcacaattacttttgtaccaacgtaatagaattaagtaaaataaggctagacatgctggctcatacctttaatcccagcactttgcgaggccaaggtgggcagattacttgagcccaggtgttggagaccagcctgagcaccatggcaaaaccccatcgctaccaaaaaaaaaaaaaaaaaaaaaaaaaaaaaaaaaaaattttagtcgggtgtaatggcacacctgtagtcccatctactcgggaggctgaggtgggaagtttgaacctgggaagtcaaggctacagtgagctgtgatcctgtctctacacctcagtctgggtggcagagcaagaccctgtctcaaaaaaaaaaaaaaaaaaaaaaaagtaaaataaagcatgggaagtcccttatacagtttgtgatatgggtacacactcagtgaaatggccattaatactgctgttcttaactctgaaagcagagtgggccatttgaatgctcactttgatattttttaaaggaaaaatttgaggcattgacacatgccttttgcttacttgcttggattggtttgatcaactttgttgcggtctaatttatgtaaaataaattgcatccatttaaatatacaattcaatgagttttgacagatgcacatgcccatgaaaccaacacgaaaataaaaaaaatagaacatttacatcacctcaaaaagatttcaaatgccacttctgtggtgtatgactctgagtccagacagcctcagctccaggaaaaccctggtctgttttctgtcactattgatgaatttgcattttctagaattttagataagtgaagttttctagtacttgttctgcatctggtttctttcattccacataattaccttgggatgtacccatactgctgcctgtatcagtggcttactcattgtcattggtgagtagtactccattgtgtggagaaatcacattgttttaaaaatacctaattacctgctgatagacatttgggttcttcccagtttttagctgttgtaaatggatactaatgtgaacgaagccaccgtgaatattgatgcactagtctttgtgtggacatatatctgttttatcttgggggataatactctggagtggaatgggcagggtggtccgtatagggctatgtataactttttaagaggttggcaaatacttccctaaagtggtcatcccattttacattcttgccaacagtgtttaaggatccacttcctctacatccttaataatacttgatattattggtcttctaaattttctgtttgggtacatagtggtattttgttgtatatttttttttaattgtgaaatatgtgagtatgatgagtaatgattttgaacatgaaaactatgcttattgctcatatctatgttattttattatttactttttttgagatggagtctcgctctgttgcccagtctggagagcagtggtgtgatcttggtttactgcaacctctgcctactgggttcaagcgattttcctgcctcagtctcttgagtagctggtgttacagaagcctgctaccatgcctggctaatttttgtgttgttttatttttattttatttttttagcagagacagggtttcaccatgttgaccaggctggtttcaactcctgacctcaggtgatctgcctgcctcggcctcccaaagtgctgggattacaggtgtgagccacagcgcccggtggtcatatctctttcttgcgtttttgtgggggttggggtaataggtttattgagatataattcatataccacacagtttcatttttagtgtattgacaggtgtgcagtcatcgtcacaatcaagccatagcttcttttaaactttgtcttccttctctttctaattatctccttcccccgccccctccattctctttccatcctttaaatgtcagtgtcccccacaattctgttgttgaccctttctccctctggccaatgctccttcccctgtagatcatacccattcccaagatttcagtcatcaaatccattccaatatgactcctgtatccatatgtctagttccaagtatctgtccatggtgttggtcccaggttattcgcacctcatatgtctttggcacagcactcttgacagctcataaagtcacgctgttacccccacaatgtccccccacatatcattgctatccctcctcgacacccacacctcttgcatgttcctgagcttcttaggcgtgttgcatcttcctgaccttcccagtccgaagcccaaggagatacttgataaatattcgtctaataaataaatgaacttgtgttctccatattccttgaaaatatgcttcacttttatctttttaagaaattaattgcattactatcttattaaaggtcaagaaaaataattcatatcactcactattcatgagactgctaaatagttgccctggcaatttctgattataattttagaaatatttctaacctctggccttttttcttatctctacttaaagcttttctggaaggaattcattttccactttccttaatgttccttaaatgttgtacatatcttaaaagtggattcctcataaaacaatatggactatggtcttattctgtttaacggtatgaaggctcgcctgaaaggccaagagtaagattcttttaaaatcatgcccaagttttaaaggaatataaaactttctctttaaaaatatacctttctgcttccatcccctaacccacaaagctcaagtctagtttaattcaaacttggaaatagttcttttattattgctccctgcaatgggaacagagctgaggctcctaaggtctagagtcaacatgaaaatacctttgcttctgggccatagctgtgtttcttcttaacaaggcagaagcccagaagagacttcatgtactgtgactgtaataaagagggttgtaagtagagaagctggaatttgaaaggttacgtacaagtcaagctgcctctgtaatgtcacttatatccaggaaagagtggcaaagaaccatcccagcagatagcttgagggtgggaagggggataggttgttgataatatggaataggagaaaaaagatcatagagccaaagagctcgatacatatactgatgcggtgtttattttattttagttttttgagacagggtctctgtcgctcaggctggattgagtgcagtgaatcttggctcactgtagcttttgcctcttgagctcaggcaatcctcctgcctcagccccaccagtagctgggactagaggcacatgccactacacccagttaattactacattttctgtagagacgggctttccccatgttgcccaggctggtctctaactcctgagctcaagagatccacccgcctctgcctcccaaagtgctaggattacaggtgtcagccacagtgccatgccctgatgtgatgcttaaattcagaaattgggaaggagggtcaggtagctataagcaaaatacaagagaaatataagagaaagaaagacttgtatctgttgttagtgagtttttgtggtggtgatacattaatggaggcaacagagggtcagaaatcagggtggaaaatagcccagcagaggggaaaagaggaagtctgaacgagggccacattgcagatagaggccggtgtactggtctgctcaggctgccataacaaaataccacaggctggataacttgaacaacaaaaatacattttctcatagttgtggagcctagaattccaaggtcaaggttccggcacagttgatgtcttctgaggtctacctcgtctgcttgcagacagccgccttcccaccgtgttctcacgtgacctagccgctgtgtgcacgcatccctggtttcttttcctgtgttcagatgtcctcttctttgaaggacaccactcagattgcaataggacctgccctgatagcctcattttttacataatcacctctttataggccgtacctccaaatacagtcacattctgaggtagtacgggttaggtcttcagcatatgaattttggggaaacagaatccagctaacaacagttggggatgaggctataacgaataccactgcctaatgtttgcacggggatatcatgcttttcagagaccatctgcatccttatctcacttaatccttgccccaccctttagaagaagccaggaggaggtcctagtcagctgatgtgagattacatggccctgactgtcttgcctggtgctgcaggccaccttcacagccttgccataccttttcccgtttatccatggattggtatgagccctaatggtgcacccttccgacaatccttcatccttcccagacgtttcatcagccaggtgaaatttgcaattgtttcagtgattgaaattatgcttggagtgcaggtgtcaccgatgaaacagcaatgccttgcggtgacaaattcagtgtagaaataattttagcaagcccagtgattggaaaacaatgactcaactttgagctatattgattttgtatttctgggctcagcttttgactcagtctcattccccagaaataatccctgttaacatttcggtttgtgttatggaagtgttctctcttctatgaattacctaatgcccataccatacatatgcctgcatttgtacactcttaagccaaataacatcgtactgtgtattattctctagtagcctgctttttattgaacttaatgataaatggcaaacatttgaccatgtcacttaagtttcttaccgtgatctccaacagctaggcaatattctgtcatatgggtttaccatacttttctcaatccacaatctcatcagagtcccaatagttgcctgatatgtctccatcagttgtgaggtatgtttcaagtgatttattactagaaattcttagcgagctgaagtttgtaaattttctcaagctactttattgatatataacacagatacataaactttgcccattcaaaatgtacaattcagtgctttcagtatattcagagagttttgcagctgtcaccacagtcaagtttagaatattttcattttcccaaaaagaaacccttgactggcatccttttccccacttccttttctctccactcccaacctctctcccagctccaggtaaccactcatctactttctgtctctatatagatttgcctattctagacttttcatataaataaatcagatactgtgtggccctttgtgtctcgatccttacacttagcatcatgttttcaagggtcattcatgttgtagcatgtatcagtacttctttttttagggctgagtaatattccatttacggatatgccacatttcatctatgcattcagttcacggacatgtaggttgtttccacattttggctattgtgcataatgcttccaggtacacttgtctacacatttttgtgtggatataggtttaccttttttggggtatgctcctaagagtgcaatttctggatcacgtggaactccttgtttaaccttttgaggagccaccagattgttctccacagcagccacacccatctacattctaaccagcagtgtaggaaggttccgatttctccatatcttcaccagcactcgctgtcatttttctttttagtcttgtcattttattgggtatgaagcggtattgcattgtgattttgatttggattttcttgatggcttaggatattgaacatctcttcatatgattattggatggatgatttttttcagcggttatcaggtcacacctgtaatcatgcccacctcattttcttacagtgcagtgtgtgcttttaggcacataccaagagcttacagagatccttctggttcagaggaaagattcacatccccaacaaacactgctccccgattacaatatagagaggctaaattatagtccatatcacttttcctttaaatccctttacttttttgtgctacaagagtttcagaataataattccgcagaaaaaagtactgattgtccagcagttgtgtcaggtagaaaactgggatgcccgactgcattggtttagccagaactatggccatgaaaccttgcctggcccccagggatggggtgaggggggatatcatatacgctttaggtggggcagaggggtggtctgcccctgtgcaggcaggaatgttcaggaagcaggctgcctctgtttctactctaaatatttaacattcacggatggcatggatcctgactaagcggagcagatgctggctctatattgcacatagctcctgaatatcagccctgcgtggctatgcatgtgttttttgttagtttttgagacagagtctcggtctcttgcccaggctggaatgcagtggcacgatgttggctcactgcaaaccctgcctcccaggttcaagcgattctcctctcccagcctcccgagtctctgggattacagacgtgtatcaccaggcccagctaatttttatatttttactcgagacgtagtttcaccatgttggccaggctggtctcaaactcgtgaccttaggtgatatgcgcccctcagcctcccaaagtgctgggattataggcatgagccaccacgcccagcagtatgtttgtttttcttcaaacctagatcaagagtcaaacactcaaatgtttggtgggagcagttgatgatccagagctttggagtcagcgagacagtagagagtggtggagatggtggcgcacaagagggtcagtgccccatctcaaggaacagctgcacctcggcctatgcgattgtgaaaatgtgagcatatgcaggccagaccttggcttctctgtcttcatttttcacaggagccagaagtttggatgtgcaatgtgaaatctcacaaattaaacatgttacataactgtattttgtttcctatctctgctgtaataaattttctcaatgttagtgacttagaaccacacaaaagttacactttacagttttggaggtcagtggtccaaaataggtctcagtgggctaaaatcgatgtgtcagcaggacaccatttctttctgtaggttctagaagagaacccacttccttgctgtttccagcttccagggactgcccaaatcctttggctcatggccccttcctctatcttcaaagccagggatggctgctcaagtccttctcaaactgccctgttcctggttctctctcttctgcttctgcttttaaggaaccttgtaacttcagggagtctaccctgataatctgggataatctgcctgtttgaaggtcagccaattagcaatcttaatgccatctacaaccttaattaccatttgctatgtaacatatttatagatatcagggattagttcatgaacatattggggtagagggcattccacatacagcagtacctataatgtatatgcttcttaaagaatgcatgagtcttaaatttattttatgtccttggagtgtatagcagagttagatagatccttctggattggcggttgattgaatattggctgtacaaagaaactggataggagtatagagaaaagatcaatcatagcactagcttatagtttattttattctttaatgattttttaaaaatatttctctcacttacttgaaaagcagtcttagaaattaactggaatgggtaatttattcgtctttcttcttttgtaaaataatggcagtttgtaactcagatttttgtatgaggaataaataaaatactgtctgttttcctttgatctttctatttgtggtccagccagccagctaactatgcattcctttttctgccttttcatcataacacctatcttagcaactcttcattgctgctttgcaaagaggatttgagattgtttatgtaggggcccgtgtataatacctcaagagaaaaagacacagatgaggctattaggattaagggaaaatcaagtaaatcgagaggtaaagcactgtgcagaaatattggccagaagctatgaacagatgccacagctgggctgaagagttacctgtgagccttccaggggtgtaagccaagagaaagacagttcaccaaatctatcgattaatagaaatcatccagcagcagtgccactgtaagatgttcaatacgtagcacctttctgtcccttctcctctagccagttgggacaggattagcaagccaaagactttctgaaataatccttagctatattcttggtattcaccaaggaatttaccaatatgcaaagacttggggataattagtattatctttgccattacctgcagtaatattatgaagattagagatgtaactctgtcctgaagaactgcagtctgtggctcaccttggagaagaacttaagaacttattgaagtgagcaggctcacctgcctttgctcagagccacatcacctgcaggcaggatctgcaaggtcagcagttagcgtcaagttgcacagcctgggcttgggtggcgttcgctttacccttgcccttgatgtggtgccgagttgtcaggattctcgtaaaattcctgggtgatggcttcttctgttctctttatttccttaagtgaacatctgtctaattgttcacctccatcgctttcgtgctttcctcatgctttctctctttccagacaataaactttattttcttcataagaattcagtctacgcaagggtattaggcagcttgtttgcaccttttaattcctggatgttttccagaaaggctgtttgcagtagttccagtgggttcatctgtgaatcaggaaagacaatgcagctttgtgttttggtttttatcagttaccttctgtttgtaaacatctgtttggaaacgtttgctggtgcccaccccagcacccccccacccctgccagaaataaagggattaatctctttttgcttggcatagggagaagacagtgtctgctgatgtgcttaacttttttttttttttggtcaggtgtgtaggtatgtgactgaaacccatagactttgcacatattgtcaaatgactttccagagggactcaggcactttatttaattaatgccaatgaagcccgttaatccgctcattactgcagtttaattttgatgctggtttttgatgatgtattgaaaacttgtataaactggcaattacaactggaaaacatttctagtttagaagagacccttatttttcatatgcttagaaatatccagcaagccacttttaaaggctttttatcacattttattcttaagctttctgaattccttattatattttgcctgataaatagttggattttgttttttggttcaatgtaagaatattcttaaactaggtaaactgttttgtttgtcattatgttctctcattctgttaaattttgttttctatttttcatgtttttgggtttttctagatggcctgtctttaacacttcttgatatttttgattaaattttcatatatcatcaaaaacagagatgacagccaggggtggtggtgcatgcctataatcccaacacttttggaggccaaggtgaggagaccacctgaggtcaggaattcaagactactgggcaacatggtgaagctctgtctatcctaaaaatgcaaaaattagccgggagtggtggtgcatgtctgtagtcacagctacttgggaggctgaggcaggcgaactgcttgaacctgggaggtggaggttgcagtgagctgagatggagccactgcactccagcctgggtcacagagggagactctgtctcaaaagaaaagaaaagtagagaggatagtataatgaggttcctgtctgccagtcactctatagtaactattaggaaacccctttttttctctgaagtcattgctcctgtgtgtgtgtgtgtctgtatataaaaaaaaagtatgtatacatatacgtatatgtatgtgtatagataaaaatgcgtgtatggtgctgggcgcagtggctcacgcctgtaatcccagcactttgggaggctgaggcgggcgaatcacgaggtcaggagatcgagaccatcctggctaacacggtgaaaccgtgtctctactaaaagtacaaaaaattagcctggcgtggtggcgggcacctgtagtcccagctactcgggaggctgagaccgaagaattacttgatgaaacatggcagacaacgtagaccagcagcaaactaccaacactgtggaggatcccctggatcttaggctcagcccagaggagcgaatttgtgtgaaaatgagaaacgaccgagagcttcgaggcagattacatacttatgatcaacatttaaatatgatcttgggagacgtggaagaaactgtgactactatagaaattgatgaggaaacatatgaagagacatatgaatcaacaaaacagaatattccagtgttctttctccggggagatggcattttcctggttgcccctccactgagagttggctgaaacaaagaatttgtcctgtacggaaaacaggagactttgtacagtggcctctctaaatgtgcaagatattcaaaagagaaacccgcatacatttggatattaagaaataattctggggattcttccactcctgaaatgagttgatttgcagataattcacaacttcttaagctaaatggtattttcgtttttctcaagctcttccaataaatatgaccaccaagatttttttttcctaaaaaaaaaaaaaaaaaaaaaagaagaatcgattgaacccgggaggtggaggttgcagtgagccaaggtcatgccactgcactccagcttgggcgacagagcgagactctgtctcaaaataaataaataaaaatgcatatatgtatatttgtgtgaatcatatacacatatataaaatatatgtatcatatacatatatatcacatttctttttctagtgtgtgtgtaccttgatttatgtctcacatattcaaaatactcaacttgtttaaaataagagcacaacctatttaagtagtaaagattcaaagccttcttctaaaatgcttaactttcctgtggatttgtggacccgtgggaaaatctcagtccccaggcaggaaggaaggagatatgacacatctctagtttgttgtaagtcgcctaccctagacctcatctccagtgctctgaatgtggagaggtaggtgcagggcagtgggacagagaggtgcactttgaaagactatcacatggaaacaaaagttccggctgggcacggtggctcacgcctgtaatccaagcactttgggaggccaaggcgagtggatcacgaggtcagcagttgaagaccagcctggccagcatggtgaaaccccgtctctactaaaaatagaaaaaattagccgggcatagtggcatgagcctgtaatcccagcgactcgggaggctgaggcaggagaatttcttgaacctgggaggtggaggttgaagtgagctgagatggcaccattgcactccagcctggcagacagagtgagactccatctcaaaaaacaaacaaaaaaaagttccaatacacaatatgttatatgagatcttcacccaatcaaggattaaatggccaattcctaaatgatgcctacctttttatggccatgtatacctttgcctcagtactactggcatttgctgacatccatttatcaagatacagggatggatttctagaaggcccaggcaggggtgctggccaggagacaccaggcatagaccttcctttctcagagccttcgtggcccctagtttgaatctttgagtcactgcagtaaagttcctgatgtttgagagtactccttatgaagggagtcatatgagttgctagctgggttctctggatggtggtgtcatgccaacatgggagccactagcacaaagaacatgctaggttctgttgagacctgactttgggaatagcataggtacttacctttctcagcaccacacaaacacactccagaatgcaaaggaacctgcactgtgccatcttgcttctccctgcatagccacttctctttccagtggtgtttgtattttggttcattcaatcaatgaatgattgattgaatcaaccacttggtcccttcaatctgtaaccttcctgcaacactgtctttgtgatgttatcataaccttgatttttgagggatagaattgggcataatcagagaaaacgtggtctgggacacatttgtgggctattctatgctaaacatttccatatcattaatgttcaacacagctttgtggtgttggagataggattatcattgttaggatggttattatcaatactagctgtgattattgatcacttccacatgccaggcacagtgctgggtgctacatatttattacctaatttatagcttgctgcactcttgctgggtatgtgtaattattcccatttcacccgatccctgggagtttggtgaattaatcacccagcatccaaatagctaaccagtagcagagctgggattcaaactcagttaggctgacttctgtgcctgttttcttgcctaagcggtggacgcattgagtaggagaaggccagttattcctctttgtcactgatacaactggggacctgttgccggagatgtggagctgtgcattagggctgggtagaacacacataatgaaccatatgcacgagaactttttcatctttctgcatacacttggaactagttctttgtttttgtaaaagcatcatgcactaggtaaaatgtttaataacacagagaaatctaattgtcaagtatcttctcaacacacattaatcaacaattctcctatcgaaagataacctcttgtatttacaaaaaaaagaagaaaaagtgctgtcatcagtaaattcattcatgtatgttatacactcacatacaaaacgtatctatttgattaaattagaactctgctaatgaattactttccttgattgcacagtaataaagtcaatgttgtaaatataataattatagccaagtgcagtggcttacacctgtaatcccggcactttgggaggctgaggtgggcagatcacttgaggtcaggagtttgagaccagcctggccaacatggtgaaaccctgtctctactaaaaatacaaaaattagctgggtgtggtggcacatgcctgtaatcccagctactcaggaagctgaggactgagaatcgcttgaacctgggaagtggagtttgcagtgagccgagatagttctactgcactccagcctgagcaacagagcaagactccgtgtcaaaaaataaataatatgtgtgtgtgtgtgtgtgtgtgtatgtacatgaattatatacaaatgagggaaaatatacaaatgagttgaatatatacaaatgagggaaaaattgttccttgtgtcaggaacaattactgtgaattttgtgtagctctttctgactttttaaaattcaaatatatttcataaagttgaaatcacactgtggtcttttttttttttttttttaaccagacatatagtggccatgtttctatgtcaatacatactgtttggcagtacagttgtactgacttgacattatagcttcataacttagtaaattaatcccttattgctgggcacagattctgttttccattttttcagtcatgagcaacgttgctggtttacctgggctaaataagaagtttaaatgcaaatagataatgcttgagaaagcttcttcccatatatactctttctgtagcagtgtctgagtgtctgtaccttcctataccttcaccatatcatgtatttgtcattttatagtgagttgtattacttgctaggtgagctggtatctcctctgataacacaaagaaggcctgggtttgcttggcaatttgttccaatattcttttcagttttaaataagttttgaacaaaaagttttagcattttacataaaaacctctaaagctctcaggctaattagtaatgtagcatatacaaattaagtttttttctgctgtgcttaattcttattaacacactaatcatgagagcccccaaattgctgtaaggagcacatttagaaaacatataaaggatcgatagttggtacttaagaaatcgttgaaacaccttttcttttttaatctatcttagagctgaaagataaaaagacttaaaatgagttagaatatgagtttttcagcatcttatagcttatgagttaaagcaagatttaaaaaatacatttaacatactaaatatttcaaaagctacagagataccgtaacatttaaaaaaataaattttcattgtggaaatcaactgccacaaaaacacaaccttttacgagacaacgtgatgtgcatgagaagccctgatgttgagaagctcataattcggtgtgagaaacacacaaggcatgatgccattcccatctgggatgaacagggaagacttcctgggagaggtgactatggacttaattttgttttgacacagcaaaaacatgaggaatgaattttgtgacttggaagattgttagttttctgtggagggaacaacactcatcttgcaaatttgccttcactattcaatcattagaaaataattttaaatgagcttagcagttctcagaattttggatttcaggaaacaaactttttaaaaacaaaacaaaaaggaggataccaatttaagcttgtcaaaaagattttcccccaaaagaaaaacacattaaaaacaacgacaaaaatcaacaaaaactaacactattcccccatcaacaatcaatattactttctaaaagcaagggcgttttgacaccagatattgtgaggacatccacctgctctaagggacagccatttcactggtgttctgtcaatttttattttgaactaattttagactcacatagaagttggagaagtaggctgggcacagtggctcatgcctgtaatcccagcactttgggaggccgaagcgggctgatcccttgaggccaggagttcaagaccagcctggtcaaatagtgaaatcctgtctctactaaaaatacaaaaattagcctggcatggcagcgcacacctgtaatcccagatacttgggaggctgagacatgagaatcacttgaagctgggagctggaggctgcagtgagccaagcggagtgccactgcactccagtctgggcgacagagtgagactctgtctcaaaaaaaaaaaaaagttgcagaaatagcaatatttcacagtacctctactttcttgtaattttagcagtttacctaatcatggtataataatcaaaactagaaaatagacaatggtgctaaatattaactatacttgttactcaaatttcaccactaaagcagtgtcatctttttattccaggatctagtccaggatgccacattatatttaattgttgtatctccttggtgcctttagtgctttttttttttgagacacggtctcactctgtcacccaggctggagcacagtggtacgatcatgggttactgcagcctccacctcctaggctcaagcgatcctcccacctcagtctcctgagtatctgggactatacgcatgcaccaccatgcctggctaatttttgcatttgttttatcaaggcagggtttcatcatgttgcacaggctggttttgagctcctgggctcaagaaatctgcttacctcggcttcccaaagtgctgggattacaggcatgagccactgcacctggcttggagcattcagtctttgatagttgcttacttatttccttctttctgatcttgagaccttgatttgtccagtattttctcatcattagctgagtgtaagcattttttggcaagaacattataaaaatgatgtggtgtctttcttagtatattatctcaggtagaacataatgttgatctgtctcatccctggtaatgttaaccttgatcacttggttaaggtgatgtctgctgagtttttccaatgtaatgttattaatttttcctttgaaattcataattatttgaagggagatgttttgagatgatgctggcagccccgttttccttaaactttcacatgctgactttctattgttggatcttgcctgcagcagtgtttaccatgatgcttggctagtggtgactatgtatttcccttactctttttatagtcagtaattggaattcttctgaagaaagagctatcccttctcccccatttctttcttttcttttctttttgttgagacaaagtttcactcctgtcgcccaggctggagtgtaatggtgcgatatcggctccctgcaacctctgcctcctgtgttcaggcgattctcccgtctcagcctcccaaggagctgggattacaggtccatgccaccatgcccagctaatttttatatttttagtagagatggggtttcaccactttgaccaggctggtctcaaactcctcttctctggtgatcctcccacctcggactcccaaagtgctgggattacaggtgtgagctacagcgcctggcccctcccccgtttatttctgattcaattactttatattagcgtagattcacaggtatttcctttttttttttttgatttattaatacctccatttattctgttgctgaaaccattccagctttttctggttggcttctatgaaggacgctattttaatggggtgatttttttcttctcactacattcttcctcactccccactttttatgtccggtggccataggctggtgagaacttgattttgaacagttgaaggtctgctgttagggacgtgctaatctagggaattgtactgaactcgtgggagcatgttagtatcagatgtgtgccttgtccgtcttgcttgtaggaagaacaagagacgagacacagcaaggtgatgatgggtatgtgaagcaggataaagaaaaaaacaggacaggcattacaggcttaagcctgtaatcccagcactttggaaggccaatgcgggtggatcacctgatgataggagttcaagaccagcctcaccaacatggtgaaaccctatccctattaaaaatacaaaaattaacaggcgtggtggcaggcatctgttgttccaggtactcgggaggctgaggcagcagaattgcctgaactcgggaggtggaggtagcagtgagctgagatggcaccactgcactccagcctgggcaatggagcaagactctatctaccccccaccctgcaaaaaaagaaaagaaaggaaaaaaaatcctggtgcttgtaggagaggcatttatttcttttaggactggacggggcttggagggtttccaggaaacagcctcaacctaaaaatagtagacacagttcatgaagaacttactatgtgtccagtagataaatataccacaagcattatcttctttaatcatctcacaatcttatgaaggagatactagtattttgcttgcaaagatgagggaagtgagtttccgaagttgctaaatgcgtaaaggaggtggtggtgtcagaatgttatcctgctcagatggttgcatgggacagtgtccagaggaaggcctctgattccttccccagcattaggcaatattcaagtcttcagttccatgtgtaggggagaagactttccttctgctccctaatgacagtggtacccacacccgtattccaccataaaatcttttttattcagtattaggaaaaaagaaacatctttccgtccagtggtcactgtgtgtgtatgtgtttgtgtgtgtgtgtgtgtatgtgtctgtgtgttcaccgtgctgtgtgaattgtggctttaaatgtattcctgtcaattccatatatttttaaaatgttgcttttagagtatgtgcaagtttggggcatttttgagggcttttttttttgacggggtcttaatatgtcacccaggctgcagtgcagtggcgcgatgacagcccactccagccccaaactcccaagctccagtgattttcctttctcagaccccaaagtagctgggaccacaggtgcacaccaccacttccagctgattatttaaaaaaaaattttgtagtgacagtgtcttgctgtgtttcccaggctgtccttgaactcctgggctcaactgatcttcccagcttggcctcccaaagtgctgggaatacaggtgtgagccactgtcccaggccagttttaactcagaatgatttcataagaaatccacatctgagagtcccagaaggtaagatattcccctttcttctaaatatacttgaccaccaccattcaggttcttctattaaccttcctatatttgccaaccctcaacctgttagaaacaagaaatgggactctggagtagatgttagcaacatcatgagctcaaacccctccagcttacagcggagacagtgaggtcctgtaggatgaggttggagagcaggaacttgcccgaggtcatgtgcagagttcgaggcagggcctggatgggaagcccagcatggagaccccaggccgtctctccgccatcttgttgtgatgcttccggaagaatgcctgtcactcttgctgacatccgactgaccaagtgggcaagaggaattcttcaaaacaatttaataaatgcttacattttctcttggccccgtgccacatccccccactcagtcttgttttcaaggttgaaggttccttcagagctagtgaccttgcccttcctggcctgtggatgtcgctctctatccgtaaccctcctttccagcgaccctgtttgcagcaaagactataattttattttgggtttggatatactgattacattttagcttctggtatattttcttacctgtcacagccattaaatttattttaatagttactctactctcctgatagccactaaagggggaattggatattgtctatcaattggttggtctctgaactaaggctgtatctaattacaaggcattgtatcggttctgatttattaaccatttacttggctttggagaaggcagcatttttagtagtactgttgagcctgcatgtagcttttccaggagggcagggtgcccggaatatctgatcttacagttattactttgtgtcatatataattttgttttctccctgcaacaaataaatctttgggactccggaagaaaaaaaaatgggaaagaaaaaaaaaatttgtggttacagtataataaaaataaactgtttgtcgtgactgcagctgacatttatcagcctgtttgtgggtgctctttctctataatacagaacataatttgtcactttgtaaatacattccagtctaaatccctgccagcatctgttagtgtttgaaggattaatgtgctaccctgtgtatgtctgcacttccagggaacagtgtagcatctgattacagatcgtgggagagcaggagggaacaaggtgttttctgtgctttttcctacatgcagtcgttttggcctttttctgatttttcttgtctttatcccattctgtctaggtacctggaatttcattctttacaaagatgttcctggtccccaacctttcttctgtctgtgatagtcacagctgaagtcatagtattttctgtgtactatgggttgagctgtgggtaattctttggggccggttagacttgggttcaaattctttctccaactagtttatgagcttaagttatgtgatttccatttcttcacttgcaaaatgaagatgctaatacctacttcttgaagatgctgaggttgagggaagaaataaatgttaatgcaaagtgcccagtttagtgcctgccaagagtaactggtgggtctgtgtcaccttctgacattatcagtgtgattgtctccaacgcatccatggaagtgaaaccgctggaggaagctaatgccgtgagccagctgttggttatgtttttgttttgtttttcttttttacttgctggatagtgggttctgtttattgagaaatatttacatccgtctaaatcaggtgcttgctagggttcttggcacacagagcatcccaccaataaactgtggttcccaacaaggcttgcaactgaatctgggcaacaatgaacatgacttcaataatgacaaaaagattcagattcctgctggaaggtccatatgtgctgtccccagtaggattctggaattccctgaatcatagtgttgcttgtaattctttccacattatgaagtggctctatagactgcctaccaccttgtatctactgctgtcgtttagattaggaacagattgccagatgtggaagaaatagcctcattagtaacttttctgtaagcaatctccttatttcttgttttttgttcttttgttttttgtgtgtgcttctgcgtgcccctcctctatggctccccccaccaaatttctgtgtcttcatttgcaactctcttttctccagtaaagaggaaagtgtatagttctcctttccttacagaaacattattttgttattgttgttttggtttgggtttctgaagtataaatgcatatgaactggacagaagtattatgcccatgtgccaggtggccaagatggggcttgtgatttgaagcttcttttcctagattcaggaaagtatcactggttaatcagggaatacatctttcggcccattggaaaatgtctgttcttagcaccctaaatgcccaggtattagcatacttgggaaatgtctagaaacccctatttcaatttactgaccatttttggtaaattcctagagatgccaaaatgcatttcaaaaagctttcatgttcaagaagacttgtggaatgatagaaaacatttaacgctgttatgtacgaagtgaaatactgttaaacttttagattatttaatagaagacacattttacaaggcaaagtgtttagatatgctccctcctatgcctatccacacatccttaactcttcacgttgtttgagactgttaggctgtttttttattgtatatttcatcaaatagtgggtgataaaacaacagacactctaaggaatggcatgacattctcctttcttctcctgcattcattggaacctgaatgtagtattaattataagactgttagacttcaggggactacactcttattctaaaatagtggtcaactaactgtgcccttcagacagaattcctgcccagcacctggctttgtaattaaagttttactggaacagaggaataccagttaatttatatctcgtctgttgccacttttgctttcatgctattaaagctgagtatttgggagatacttgaaaaatctaaaatgcttactatctggccctttagagaaaaggttttccaatctctgttctagaggattcgtggtcatttggaaagaaaagtatgttaagacaaaatgagcaggtggttggattagtattttctttctacacatatagaaactgttcctatcatacgtgactcagttttcaaacttgcttaatccaaagcctggggggtggatgtaggagagaagttgaaattagctggggttttttttttgtatcacaaaagttacattttttttttttttttttttttttttttaagacgtagtcttgctctgttgcccaggctggagtgcagtggtgtgatttcagctcacagcaagctctgcctcccaggtttacgccattctcctgcctcagcctcctaagtagctggtactacaggtgcctgccaccacgcccggctaattttttatatttttagtagagacagggtttcaccatgttagccactttggtctcaatctcctgacctcgtgattcaactgcctcgccctcccaaagtgctgggattacaggcgtgagccaccgcacccagccgaaaagttataattttaatggtctaaatcaaatttgttcaacctgcagcctgtgggcacatgtggcccaggacagctttgcagcccaacacaaatgtataaacttgcttaaaacatgatgagatattttttgccatttttttttcaactcatcagctatcattagggttagtgtattaatattttatgcacagcccaagataattctttgtccagtgtcacccagggaagccaaaagattggacaccctgggaataaaacagaaaaaaggtgtaaaaggcttcgagttcatggacagaacaacatttttgtaagtaaagtatttacggatgtggcccctttgtaatctcctgggctcagggataatttccaggctggggagaaggttgtgtcatggagacagcagtactgttttggaaggagaattgacttgtcacaatggacggagaactaccatcccatttgggccaacctcttttttttttttctttttgtttcgagatggagtctcgctctgtcaccaggctggagtgcagtggtgcaatctcagctcactgcaacctctgcctcccgagttcaagctattcttctgtctcagcctcctgagtagctgtgattacaggtgcgtgacaccacaccccgctaatttttgtatttttagtggagacgggatttcaccatgttggtcaggctggtgtcaaactcctgatcttaggtgatctgcctgcctcagcctcccaaagtgctgggattacaggtgtgagcctctgtgcccggcttctgccagcttctcattatgatttttgagcagatttcgctgctttttctgcctttgttgtgtttataaactagaagtaattatgtcaactttgtaagggctcagtagcgtagaataaggccatgtctgtaatctccccttctgtgaacagaggttatgttctcaaaagccttcaattaacatgagtggaatggattttctaaatttatatggaggagaaagttgtaggtcctatatgagtgatgacaggtgatacttaagttaactggaacatatggcccttagccacaatttccccacatgcccttctgggggatgctttgtagacctgatatcccagaaaggagtgtggactcataaagtcactgctgtcctttggttttcctgatgtaccaaatgtagtaaggcctcttttcaatgtggtaaaagctctgggccaccccataaggctgcaagcgctagaagctcttcccatagagaacatctatatcctcaaaccaaggagaaaaaggaagctgctgttcataaatattgaagaggcagggagagcttgcactgaggccagggtgtattaacatgcatgccatcgtgaagtggcttctaatggacatttgtaaggtggtgtcccctcccttcccctcccccctctaatgctgcctgggttgctctttgcaacacgtgcagtctgcaacttagctggcttttagcaaaattacccatcgcgattcatttgtcccattgggccatgggataggtgactacagagccagattcgaatgtggccctgtgccggtgcccaaaccagcaggctgcacgtgtgcactgacagaatggtacatcccaccactgctctgtgtctgtgtgcgactgtcagttgctctctactgctcctcatagacttcctgtctgcctttctctgcatttctcagtctccccatctccccttcttatctaatccccttccttcctctctcaactcttccttcctctatcctttttctttcccttttttttttaactattcttctttagagtttgttttctcattgaacttgtgatgtacacattaaaggaaaactcattaatgtggaaaattaggagcatcatagctaatgtatgctcagggcttactgtgtgctagacattattctgagtttacacagtgatgtcagatttctcctctgtcacagtaagttccaaaagatagtgaagaatattgcagtgaaaacactgaaactcacatatttcatactcaggggtatcttttaagtgtgaagcaagagaaaaaaacgtggaaaaaaaaagactcaggaaatgctttccatttagctttcttgactaagttagtggaagacttattccagattataaagagaagaaccaaaataaagagtttaagaatgaaggggtatgcagcaactggtagggtcgagtctcctcaggcacaacatgcaaccaaggaggggcagctcactcggcctgcgctggccacacaagtgcacctgccacagtattgaggggctggactgatttctcattaatgtctgggcaaaactcaaagaggcaaacattttcattacatactgttatccatcctattgtgggaccaatttctccagaaaggtctctctcggtgggaggattaataaacaccatcagaaatccaattaaacccaattgttaaaatccaacaaatacgttgcttgtggatacagttgtgtatagtaatgtgtatggtgatggcctatcatataggaatgatagaggcagcacagtgctgtaatggaaaccataagggcacgcacaatggctcatgcctgtaatcccagcactttgggaggccgaggcgggaggatcacataaggccaggagtttgagaccagcctggccaacatggtgaaaccccatctctactaaaactacaaaaatagccaggtgtcctggtgcatgtctgtaatcccagctacctgggaggctgaagcatcagaatcgcttcagcttgggagctggagcttgcagccagccaagatcacaccactgctctctatcctgggagacagagcaagactgtctccaaaaaaaaaaaaaaaaaaaagggcatggatctagatgccagacaatctgggtgcatatctttgctccaaaagcaaagattgtaaactctctttacaatctggggcaagttagctaatctctgcttcagtttgctccttagcaagatgggatgatattaccacttacctcagagagttgttaaatgggtaaattcatatgtaagtgttcttagagcagagttcagtacatagtaagtactgtgtaagaattggccatcattaatattattcattggataaatatcaaattcaaaataccgtttacattgggaaagggaaaaaggagagaaatatatgagagacgtatgctgggggtatctacgatgtttttttttttgatttttttatgtcattttaaatgtttctattcttctgttctgttcttaaagtatgcctgtaattattaggatataattatggattctgtcttatttattttttaatcttcttattgtgtctatcttttgtctttctccatattctgggagaaacatctaagtttccattccttataactgattatttttcttgggatcaattctggtcttcaccatctgccaatgtgagttttagtttctctataaacttttaaactttaaactttttttcttttttttttgggggggggggggcaatgcattcttaacccccttccagtttttctcagcctattcttgtttgtttttgttttctatttctgtttcattgagatgcatacaaaatggaagatggccaacatttctaaaaattttgtttcctgacatagagaacgtttagaggtcaggttgctctgagactgtgttgtgatttcttttttttttttttttacttgtttgtcctttcttttattatctcttgctgttatcctcacttttttctttgctgttcttcatcctttaattagcattcaaactaatcgttattagagtgtgtaacatgatctttgacatacctaggtaattttacttaagtatatgagttaagttgatacgcacagttcctcagcatgaatgtcattgttttgcaaattttagctgaaggtgacatcactgtactaaaattttcttgtgcatccacttcctagctatgactctctacagatggatataacttttttaagatgaaaaccatttattttcaatttctagtttaactgcctcacagtaaaaaagtgtactttttgtgatggcaggaatttgaagtatgttgaaactgcctttgtgatctggctcatggttaacttcaataacgtatgaaaagaatccatatttttatgtgtagtgttctgtagctcttttagttggtttatactcttttaatggtctgttgaccattttatctaaatattccattttgtcttttacttatttctattataaatggttaatctcttctactaagattgttaaatccatctttttgtttatggctgtgttatttggcacatgcaagttcatgattgttatatattcttgcttaattatttttccctttatgcatcatccatttttatctttagtgtttagtgttttttatttttattttgcctaaaattttatttttatgttaatatttgctatactagctattctgctttcaaaatgttcctgatgtttttctttatctttatcatttatcttttatctttaacatttttatatttctctcttttaatcatgtgtgttaggtaggcaaggatagctgctaggacaaaatattttctgatgttttaatagcttaacacaatggtaatttatttccagcttatgtaacagtgcttattgggcgctcagttgaggctggaaatagacatgtgagtgttttatggactaggccttgaagaagtgtacctcccttagatttatattccactggccaactctaagtctcacggctatgcctaattgtgaaggagactgggcaatgaatctagttgagtgccctgcaaactaaggcacagggatttttgtgaacagctggtagtctccattacagttctcacatctggacaacaagtaccttttgctcccttattctcacacagagaacatattcacttttcttccaaaggcagagtctcaaaatcccatttaattctttgattctgtgcaaattctagggtgtccttcatgcttagatatggttccttatggtcctgtgggtttcagaaaggcagcccattcatgccgtctacccccctgctgctctatataatagaaggtggagtagagacagaatatcagtagcaaaatctccattttcaaaagaaaagaatgagaaacatgttgctccatgacagtcaatgatagaatcacgctggggaggtaaagaaccttgtagtaagagagcattctttatccaggtctgaaatctgctctctggagggaagtgccctgtccattatcctccatggtcccatctgaactggatctagagaagggttactctccttaggggaattagcagctgtcagcccacttcctgctggtgcatggttgaggctccgtttttttgtttttagcagttataggcttttaaggtcagattaatctttatttaatttcttaataatcttataggattcagatgtatttgtttcccattaattcatgagtagtggccacaccagtctttcctagacttgaatctcaagttgctttatttttctaatttgttatcatcatgcctctctttcagcacagtagcagctactatgaggctatttggaataatgagcttggtttgaaaagtagcatcattaatctgatatatgctactgggctgaattatttgaattcataatgggctattgtctctcaaagacttttgcaggcttattttatgctttttggactccagaatcaattgactttttcaactctgtaatgtcctaactttcatttctgcttgcacactggacaatgctttttttcaggaacacatctctttcttgtaatatctttgtaaaagcagcgtggagcagccagcacacaatgacattttagctcttccctagagcttcagactcaataggtactagatctaccttatgagttatggcagagcacaattttaccaaaagtctttcagtgtaaagacacagatccacatgggtgtctctgattgacagttggctttgtctatttggtgagtaggatatccaagctcatttcatttagtggctgtattgtcccctaggaacttattataacttaacgtttatctcatggaaggttgaagtatggggaacccaattcatatgagaaatagcccaggagttacattctcttctgctcagtgaccattagtggaaatgtaaatatctcacctcaatgcagtgtgggttaggaaatgtggctttctgtctagtcaacctctttttcctatgctgtggaaagaggagaagtattctgagggacagctagttctatctgcagtgtatcttttttaaacagcatagaactattttttttttttaattctagtcttggtttctgcctttcaatgtgtgaatttaagttcatgtttcttttgatgactgataaatttgaaataatttctgtatttcattgtgttttcttcactaccaagtttttcttatttttaaacttttctgagcatatatatgtatattttttgagacagagtctcagtgtcacccaggctggaatgcagtggcttgatctcggctcactgcaaactctgcctcctgagttcaagcaatcctcccacctcagcctcccaagtagctgcattaaatacgtgtgccaccaggcccggccaatttttgtatttttagtagagatggaatttcaccatgttggccaggctggtcttgaactcctgacctcaagtggtctgcccgccttggcctcccacagtgtggggattataggcgtgagccattatgcctggccaccaggcatattttggaattgatagaatttctttttatctgagttactccatacatcattttttctccctgttgctcatttggaagctaatgattctttcctccctttcttcctttctgtctttctctgttttcctctctccctgttagtcttgaaagtcttacgtacatgtttaaattttttcttagagtatcaagttatttaatgtctatcattctaatcaacaaagccagaccatgcatgatttaatggatcagtgaaatccttccccccataaaacaaacttcacttgttagtgttgttttagttgcttcttaaattcattttcagtataatttatttggtcctgtagctactccaaatgacgcacaaaatttggctaaactgatgactctttttgtgtttatggtgttttgagtcctcaactttttctgtcttgaatttttttttttttttttttttttttttttttttttttttaaggcagagtttctgtctgtcgcccaggctggagtgcagtggcgcgatcttggctcactgcaagctccgcctcctcggttcatgccattctcctgcctcagcctcccgagtagctggaactacaggtgcccgccaccaggcctggctaattttttttgtattattagtagagatggggtttcaccgtgttagccaggatggtcttgatctcctgaccttgtggtccgtctgcctcggcctcccaaagtgctaagattacaggcacgagtctccgcacccggccctgtttttgcatttttagtagagacgggttttcaccaggttggccagcctggtctcaaactgttgaccttaggtgatctgcctacctcggcctcccaaagtgctgggataacaggcgtgagccactgcgcctgtctacattttctgtctttactggtattatggtgggaacccataaaccactgcgaggcagataccattttaagcaggaaaccttatttttttccgaagcacatttaaaaatattttccagtttatctattaaacatcctcctttgcttctggagatcctctgaaagatttatctctttcgattcatctgtaaagtaaaaataaccgtcgtcgtcatttctcaagcgtgacgatactgttacacgtttactgcatattctgcataccaagcacatatccgtcacacgcagtgtggccaacttccgagaggccggcattcagccaaacagcctgaagaaccaggagaaatgcctgagtttccaaatggcttatggtaagttgttgctgccactatgagtagcctacttgcatttctatttaatggcttttccccatatttgatggtatgttaaacagtcaatcattcattttctaaattaaagcctgtcctgaaaacgtgctcagtgctattgactgtgcatcaggtattagagacacagatatgaaactgtactttttaatttacgataaatgtcagtgtgaattattggttgttttgcttttctttcatagtctccgtaggcttcttgggaatggaaattggtataacctttttggaggaccctcagtaaaaagctatcaaaatttaaaatgtgggtatctcttgacctagtgagtctacttccaggaattcatcttaaagaaaaaaattatagtttcctaagtatttgtattgcagcattgctttcagtggccaacaaaacaaaacaaaacaaaattggaaacaacataaaataatattaccggagaaacaatgagtaacatgtataggatttttttttttttttttttgacggagtcttgctctgttgcccaggctcgagtgcagtggcatgatgttggctcactgcaactccgcatcctggtttcaagtggttcttctgcctcagccttccaattagcggggactaccagcgcatgtcaccatgcctggctaatttttgtatttttgtagagatggggtttcaccatcatggccaggctgttctcgaactcctgacctcaagtgatccacccgcttcagcctcccaaagtgctgggattacaggcatgagccaccacgcccagccgcttctcgtagatactacccaggaattttcacagtaacttcaaggaagagattgttctgtaatttctgtttttactgataaggaagctcacgcttagagaatgtaagtaaaaagttcacaaagctagtgaagtatgtgggggcggtttttaatgaatgattgaacattctttagtggaactacaatactatgtttttaggaaaagttgcacgatgtttttacatgggtagaaaatatactctggaaggatttgaaccaggctgtccctgttcttatcttggggcagtaggactttggggcacgttttcactttatatgttatcaacttctgtattatttgtaatacaatgaaccagttttatttttgcaactaacagtaagtataaatagctgatgaccacttggggtgaaccgaagtgcctatgacaaaccacacgcaggcatcctcgggactattgaggccagataatcctttgttatgggggctgttctgttcgttgtaagatattgagtagcatccctgacctctgccccctggatgccagttcactttccaacaagttgcaacaagcagaaatgtctgtagacattagcagatgtctgctagcagttagaatggcctctggttgagaatcagagcagactctgctcacactgggctatcagggtatagttctctccctcccaacagctggaactgagaccatctccctccatttgaggatcattccgatttcccaagtccaccgtgtggaatgtaaaatcctttgaaccagaacagacaaatcttgtttttgtctttttattgaatttaaccactattgacttgcgacttgcggcaatcaccagatcccagatctctgtgtttggagctacacgtctttctgaatcgaggaggtggggcactgatttttcttttatcactgacttccccgaagtgggaagttccagtgcttaacaagtttcattaagaacacagctattaaatattcagaatatacagactgttgctgttgagaatgtaattatgcagtaaattagctgatgtccagtacgttgccttttaagcagatctttgatgtatgcagtacttgcataagatatagggcatgtttattaagagtcttcaactgtgtataaaactagagcagtcaaaagtaatggtgtctgctgaaggattctttatcatatgaatttacctttagtcatctattatttatttcagctattttatatgccattataataaatattatgacagagaaagcttttacgcttcaacttattgtactcctctttacttgcctgcaatccttcaggaaaatgtaaccacgctttacctatagttaacgtaaatcatcacttacattagaatgaaaaattcactatgaaaaaaagctcttacttcaatagcaaggcataaatgcacaatcatgttgactgccaacctcctgtgtcattcactgtccttccttaaactgtttttaagctgcaaagtgaatatattgcatagagggaaataggaaggttttggattattttcgctctcttattagtttctggcaggataagcattttttatccggattgcaaaatattgccaattactgtctaagcatttttaatagttttgctttccatggcacgcaactcatatactaaattaaataagctgttatctggtgcaatttctccttgaatagacttagaattacctatagatattgacacggttattttataaattgagttccagcaacacaaggcaaaaattttggcctgtatgtaatgaaggaagagttgtcatcattttcttattagggatgtttgtgtattttggcagggggaggtaggaaggggacctgatggagggccctggagtgaaggttgatgctggatggttgatttgaaggttaggaatggcaaactcagcctctgttcttcaagaatccccctgcgtccccccgccctgccccctgcctaaaaaaaaggaaatccagggctttgctagggatcatttttggtgtggttctgtgttttaaaatgtggaatcatctccaaaagtgtttgtttattaaaagcaaagtgataaaatgtgtcaagtcagtgaagagactctcaaactcccctttcctgcgaatcctatcagaaagaacatttatgagggcatacttttcatctttaggcttggcaaagatgggtcaaactccccatcagactggcacatggtgctgtttcaggtttgactaagagagaaaagaatcactagtcaatgaaagcaactgtgtccccatgcattttccagtgaagatgcgatcacccattgccaccgttaccattacttaaataatattagaggaattagtgttatgaagtcccacatatgatattgatgaattattaaaccagttgagttagatttctattgtagttcagtgaataatgtcatgtcaatactgtgctcaacgccagtgtctcttgctgttgtaaatgtgacagctcctatttaaggttttagaacataaaatcaggactgagagtatgtaaagcggaagggtgagagacatcagcataatgcaattaaggcccattggattagaatttgcaggatgccattagcaataagctctgagtgtagattattgccgtgcttacattttctccttcagcggtaacacttctcttgtaaattctaactgggtaaaataaatatgatataaaacagacacaaataagaatatatagatgatgttaatttcttcagagcttcccggtgttacgtcttcaagaatatgacgacaggggaacagcccagtgtggcagtcatgtgacgacatgagcattggaaccagccacatctcagttggcaacacgtatctgtgtcttactagcttggccactgtcacgtcactcagcctctgttttctcatctgtaaaatggggaaaattatagatgcttcagaagatatttgctatcactattaaatgaaaacaagcatgtcatcagtgcttattatttttgttgcttttatgatcaataaatacatgcaaattagagctttttaaatgagattctggaaataagtttttccgtatgtgtaagggaggggtagatacactgccatccaatcagcatcaatgggtaccttgaagtgagatcacaaaatagctaattccctgtaaacagcaacccttctctctgcagttgcacatgagtagtcccccagttaaaagagaatttcctccagatacaatggaggccacgttcaacacagccatctagtgtacctgggcttcttccacctccagccactgtaccgacgtgttcctttatttcacccacatagtgatgatgcttccaacacagcataacaaagagctgctgctttgtgctgctagatttgccaaaagtctgtgccagggattcttttgttggaggtaagtggagaacgcaaggcccacatgcacaagatgggagtattttgaagcatgctccgtaagacccaacatgtgggcagcagaccaactacttgggttcactatggcgagaaatgggataggagagcgaactcactgataccctcccagctaattcctaggcaatctgcaattaacaatgattgtaaagtaataatttgtggttttgaaaactaggtttgatcactggaattattcctgtcctatgttctaaaggcctgttgccttgagatgttttttctcctcccattattggtaagcataatgtaggcatgagacgttgcctttgaagtgtcggaaggatggagaggagaaaagaaaacggagattgaatctggaaaacgcattcatctttagaggcagtgttaatgagtacatgaatttagtcctgtaaatgttttctcccttatttgggacatggtgtattgaaggtgtctgttaactgtgctaccaatgagtgcccctgtatccgagggaaactggagaagtgtacttgggctaccgggttaccaagagcaggacagcatgaggcagttacagatctgatggtttttcttggtctttgtctcagctgccatgagggcttctaaggggcaaggagggttgggggatgagaggacaggtacatagtgtggacataatggaatatggaatagcaattgaaatcttgcgttgggctgaatcatggctttgcagttattatcttgatgcggctgtgcatgagccttttgaacctcagcttctccatctgtgaaataggtggataatgactgcaccctgcgaagatgctatagggataaataactgctgtggggcaaggactgaaatggttgttgttttgagatggcttttatcattgggccagtgacgacccattcagccgtatcagtgaagagtgaagcactgcactctttaaggatagggctgaatggtttatcacccattcagcggtgaccaccacatcttatgcattgtgatgatcacgatgataaaacaatacataatcacaatataaggatctagagttatgaactactgatcaggtatcatgttctgctccaactgctttagatacattgcctgacttcccgatagggcaggtgctgttattactcccacttcacagaggagcaaactaaatatacaagaagcagtaacttgcccagccccaaaccaccccctgaaaaaagaaaacaagggagacccacagttattaatatgcattattattggaaaacaatggtcatcacattttagcagtggccttcaaaataatgataatagcatatattgagagcccattgtgtggcttgtaccttatattcactctatctaatcttcactctaaccatagaaggcaatactattatgctcattcataattaaggcaattgaagcccagatccttccagtagctttcctgaagtcaagttgccagtgcattggacatactgggctgtagttccagggcagcctggctctggtgtctttgctgcaatgacaatatctccccatttctctgtttaaataccacacactccccatatggtttctttggtttcaggcagtatcgcatcagagtcacatatggctaatttatagtcataaaatgatactagagatcactgttgcataacaacaagaaacccctttgattccacacttacagactcttgagtcactaacacaggtttcagtatatataaagaatagatgaagaagacttagtgtattaaggtggcagtgaactgtgctactgatgagtgccactatattcaagggaaatgggagacatgcacctgggttgtttgattatgaccttctggctgagccctggatgttgggagcaagtgggcttctgagctacatagaagttgcctgatgcttcacatgtgggatgccacctgtgtggctctgttttaaaatgatgggtaggtagagtctgtatacataatttaaaatacattaacatttctgttttgcctgagataagcttgtactggtgtgatcagaaggaagaatgaagatttggggaaggaaaattttgagagccattttacagcatttcaagattcagtgatctcagaacctcttttggttaaacaagcatgggaggatggatgattggatggatggatgaatggataggtaggtgggaagataaatggatagacatataggtaggaaggaatgagggatatatggaaggctagcagtttattttacggtggtgggatttttttcttttccttttttactcagacagtcttgttctgttgcccaggctggagtgcagtggcacgatcatgtctcacggcagcctcgactttccaggttcaagtgatcttcctgccgcagcctcctgtgtagcaggtgcatgctgctatgcccagccagttatattttagatgcttttttatatggcccatattcatatgtctttgtgacttttttttataatggatgtgagtgtgaagtaggagttggcctgaaacaagcccagagaggtagacagggaccaagtcatggactgagttagttgttgttgttcctcactttctgtttttatttctcctctttctggacacatagcacgttgcaccttctagaagctaggcacagccacatgactttgtcaaggaaatgtgagcagaagcaacaccagtcactattaagtggaagtctttgagatgccacgtgtaactcaccacattgccttccacatgccgtagaggctggcagtgttacagacaacagaggctccatccacctggtccctgagtggccacggtgagctgggcccactgacctacaatgagtgtgaagtgtgagcaagtcataattctgggttattctaattaatggagatttgggggttgttccttactgaagcacatcctgattgatgcagaggatcttgtgagccatgctaaggaattcagcccacgtcttactgaccactctgacgtactaaagggttggttttgccaatgaagagagcaggctctgactgaacgaggcctgaacttttcatgttctagatggcatgtgctaattctaacacttcttaatgaaagtcatggtttgcttggtggtgatggaacagttctatgtcttgaatgtggtgatggttatatgaatacatacacatgataaaatgtcttagaattatgcacaaaggtacagcaaagaaaataaacgcatctcaagttgtgttagttccttctcacactgctatataaacatacctgagactgtgtaatttataaagaaagcaggtttaattggctcattgttctgtgttcatgttctgcttctggataggccttaggaaacttccaatcatggcgaagaggaagcaggcaaatcttagcaggagcaggaggacgaatagggggaggtgatatgctcttgtaaacaagcagatcttaggcatactggatcacgagacagcactagggggatggcactaagctgtttttaaccagccccatgatccaatcacctcccaccaggccccacctccagtattggggattacaatttaatatgagatttgggtagggacacagagccaaaccacatcaggtgacatcccagtaatgactgtggtctagtaaattgtgttgtgttgatgttgattttcaggttttgccattgtattgtatgtatgtaagatgtatatatgggggaagctggatgatgggtatagggtgttctctgtaccagtttggccatgttttgtgaatctataattagtttcaaataaaagttaacaaccagaagatcatgagctaaaccaataaagtgaattatggtcagttgcagattcactgccagacctgggaggaaatctcaccttggcagatcgagtctcttgtcctcgcctaacaatcagcagttcacctctcgaaaaggggttccgtttgcaatctgtcagccactaccttcttatttagagcatgtcccactacaaacatttctataaagttactaagtttgttagacaattagaattgcaaacccccaacacacacataaacacatatgcacaccctaatttaaaggctgcattttccatcccctggacttactgtattgcctccagtttctctccatttctcaggattggtagcagaaatgggaaacctgatacctagggcaagagaattgcctgaataacagtgtgtggacttgaatcactatccccaggagcctagtaacccacagcttgtggattagtctgttgaactacttgatggcttgtgacccctttttcccttagagttatatgttctgattttcttcttattgatagtggcagctctgtgctttattttgaagggaagcaggggaaccaaaagaaaacttagcagttgtaagttacttacagagaagactgggctagttggctgtgctatcatttttgttgaaatactgctttggggtcgccatctgggaatgttcttcctgttttatgggggaaatacatacatgcgtttttataatatgtagcctgcatatcccttggggtttccactgggggcttggctgagcagagcaatttctttaccaccccctccacagcataatgaatggctgcctttcctcttgtgatacattcacatttctgtaagattctgcacgtggcagtgagtgtcatgctccaagtaaaacgaggcagggaccagaggacttaggatgaggatgaaaggtcactttgtttgctgactctgaatgtcaggtagttgtgtttatgaggcatcagcgtctctgtggggtattgaaacatttacactttgaaaatatttttaatcatcagataaatatcagttactcagacagcttatgagggttctgctcctcatctggaggtacacacctttcacggggtgtgacttcaccacatgccttcaatattcttggtggcagttgccctctttataggggggatgtggcgtcaccttatagcagaccctctagctctgttatttcctgaacgtaggaaactaacaacccacgtgtgggcgttttccccttttcctagatcaggttcatgtttctcctcctcgttccaaaatctgcacactttggcatctgccactgttacccaagaccaggaatttaaatctgtgtttgccagtttgcctccaccactgatgtgctgttggggtttggggacataatttcatcactttctaccacctttccttaaaactaggctttgtgccaggtgcggtggctcacgcctgtaatcctagcactttcggaggccggggtgggtggatcacaaggtcaagagattgagaccatcctggccaacatggtgaaaccccgtctgtactgaaaatacaaaaataagctgggtgtgttggcacgcacctgtagtcccagctagtcgggaggctgaggcaggagaatcgcttgagcccaggaagtggaggttgcagtgagccaagatggtgccactgcacttcagcctgggcgacagagtgagactccatctaaacacacacacacacacacacacacacaaaagcacagggctttgttagcaggcatgacttggattctttaggatccttccctcagtaatctggtctgatgtggccttcagggaggatctttggacatcattgccatccatctgtccactgtgctggactataacccacccagactaccatttattgccaagtggcatcgggacaagagttttacacaagaaacatcttctctgctagttaaattaattagataatttgtcttccagacaggatgttaggaacttatgaacatgtatcgttacaaacctatgagtagatgactaatattcatcttttacagataaggaaactgaggctcaacagtgttaaatggtccagaatgagtgtgttttctagctgtcactgcctgatgtttactgctcaaagcttaggacttggattagagcccaggacttggcagccaagataaaccagctgcaattacgctgaacgtctcagcccagctcctgtccatccctgaacaggacacttagggtagaggatgttctcagcagtgccatttgcatcccccttcatagccttacaggtatcatgttatcctccttaatcttacttaagcatcacagtctagactagaattcccaagtcaaccgtttgttttacgggactcttcttatttgaataggcaggtggccctgtgttcttgggttttttgtcctttcaaggagctaggtctaagaagtgatagtatttaatctcgcactccgaagcgcacccagatttaaaagttgggagtggcccatacacagaaggctagtgggaggggcaacccggagatttgtccttgcagaatgatgccatgaagaacatggccaatggaacaccattgcttcaaatcccgacctctccagttctcctggtttcttgctaggcgggaacttgggcttctttatcagtgactggggtcagttcttgtactcaatttcctatctctgtgatctcttgtaagatgctgcattgtcaaatggagaaaacattgtctttgagttgttaggagccttgagtgagatggtatgcaaatgtccagcccgtggcaggccctaagtacacagtagccattattaccattattattcctatcaccagcatgtattccacctgttgatagagttttctgggtttactaagccagggtgttgcctttgggatcgaggtccgtcagaatccattggtataaacgagtctttctgcttttgtactttctataaaggagttgtctttgatttttgatgcaggtttaatggagatatttcagaacctggatggcagcttttgaaattaagatattgtccattgcatctttccatgatcgaggcgttgtcgtgcattcccctccttacagcgttttaggatgcagattgagaggagataacgttagcccgaagcgcctttgcagcctcttttgcgcggctgaaacacagcacaacccacccccccgccccaccccccagcctgtaggtttagcagaatcccagcctcacatcctccccgaacttggcagtaaaagccctgttcttccattcattccgatgatttatattctctctgggcgtcttatattaaacaggggaattccgacatgttccataacacatttactgtaacttgataccatgaactacacttgctgttatttatcatttctttttattttctctcattgcagcataaagccaaggtagaagcaatgaccctggacctcgctctgctccgtagcgtgcagcattttgctgaagcattcaaggccaagaatgtgtgagtgttccagtggagggttatagatcataatttcttgctattgtaatatctttatcagatgaacacaattgggagaatgcaaggctgttgtgttgtcttggcgtccaaacaggaggctcatttatattggccctgttaaggtgaaccgtattttcttgactcacagtcaccttcattatgagatgtgtcatcaatctaataacagcttcccacataccaaaagagaagacactattaaagcactagtaaaagtggctaataaaagcttggcaatagtaagatgcatcctgattataagattttttgtagtgcatttcagaatggagtaagagtatatttaaattgcattcaggaacaagtaaactcagttatccagtatggcagggaggttgacaatccaagcacccaaaagacctctagtttctaaagccttcgatgatttgatgtggtacatggatgtggttccaaaaaacatggactcacattccttttatttattttttttcatccttttcagtctttcaaaattccagttggagaaagccttagttagggcctagcatattttgatcctatcatatgctagcatccctttctaacagagaaggttgtaggagaaagggagagaagcggaagggggtggggagacagagagacagacaggaggcctcaaaccctgaaacactgagctaaggaaagtgatcatggcaagctacactaattacaatactttgtttccaagtgtttatttttactcatatttagggcaggcaatcctggtttctcgttgaacatagaggtttgaatttcattaataaataacttcatttattttttttcagtgacttgattcaaacatgaggattaagttaataatagcacaggttgtgcgaaggataagataattacacaagaggcaccagaaccactgaatgtggagagctctcataaatgacaagctgcctttgggttaggctctgttgggaacattagttctgcagtgttgcaagcagatgaaggatgtgagggaagggatcttaaaccagatattcaaatggccctgtggggagctgacaccacactgctgtctagtgtccaattctccttgcatggctgtgtcacccaggttggaacgtagtgcacaatctcgccttaatgcaacgtcccactgtgggcccaagtgattttcctgtcccagcctcctgagtagctgggactacagatgcctgccaccatggcctgctaatttttgtatttttagtagacatagggtttcaccatattggtcagactggtctcaaactcctggcctcaggtgatccacccgcctcagcctctgaaaatgctgggattacacacatgaaccactgcgcccagccgctctactttattagatttaaaaagtttgctctcagctgggtgcagtggcttatgcctgtaatcccagcagtttgggaggccaaggcggggagggtcatgaggtcaagagatcaagaccatcctggccaacattgtgaaaccccatctctactaaagatacaaaaaattagctgggtgtagtggtgcacacctctagtcctagctacttgggaggctgaggcaggaaaatcgcttgaacctgggaggcagaggttgcagtgagccaagatggcaccactgcactccagcctggcgacagattgagactccgtctcaaaaaaaaaaaaaaaaaaaaaaaaaaaaaaaagtttgtactcagcctggcgtggtggctcacgcctgtaatcccagcactttgtgaggccgaggtgggcggatcacctgaagtcaggagttcgagaccagcctgggcaacaaggtaaaaccccgtctctactaaaaatgcaaaattaactgggcggggaggcacatgcctgtaatcccagctacttgggaggctgaggcaggagaatggcttgaacccgggaggtggaggttgcagtgagctgagactgaaccagtgcactccagcccgggtgacaagagcaaaactctgtctcaaaaaaaaaaaaaaaaattgactcaggctcttgctggagtatgtcagtgtcccaagtcactgaggtctacattagagtcagtcttagtgagagttgcaacatcgcctaagcgcagaccccaagctggcttgtaggaacagtgagataacatcccccagccagccagatctgagagagccctcctgtgtgtgtcctttgcagcgcttggctgttagtagcttccaccctttgccagaactatcaagaggcacctcaacaggctgcaacactagcattcaagacatttgttcgctgatttgcttcgtcattcatttatccacccgttccttcacttcacacacatttcaggagcacctctaaagccccagacattcttctgggctctgagaagagagtggtggccctggaagccacagtaaccgcacacaagctgtcacctcagttgtcagctattatggatggctgactcctcaaactcatctgtctgtggttgtttgggagggaatgataatgacaagaacagcagcggagtcagcagctcatttactgagggcttatgggccatacgtggaaaatattttgcatgtatgttttgattcaattctcaaagcagtccttgggagtagatgctattaatatctctactatacagataaggaaagtgaggctagagaggatatataatttatccaaggcatgtggaatgtgggtagaggggccgatttagcctcttcacggctccaacttgaccaccgtactatactgtgtttcattttagtttattttttatttattttttgagacagggtctcgctgtgttgcccaggctgaagtgcagtggtgcaatctctgttcattgcaacctctggccttgggttcaagcgattctcatgcctcatcctccagagtagctgggattacaggtgcaggttaccacacacagctaatttttgtattttctgtagagatgaggtttcaccatgttggccaggctagtcaactcctgacctcaagtgatctctccaccttggcctcccaaactgctggaattacaggcgtgagccaccctgcccgaccctttcattttaaatgtgatagaaacagactcagagaatgtgagtgactttcgcagggtcacttagcaggttggtgacgggcatggggtttcactccagtctgcctcttgttcttttcctcatagcatgtgagatctcacaattcactgccgctgaataactttgtccagttcctctgtcagaatgtgttggaagtgagcagctttgctgaagagagccaactgttacataataggatcatcttccacgtcttaactggaccattagtttttaaccattaagtagttgggaaatcatcaagttcaagtgccttttgtaatcaccaagctcaaaaccttggaggaaactctcacccattttgccctaatcccagattttagcacaggactttggaattttagaaagtacttctaggttgagaaacaagggtgattttccatatagagacctctgtagcacaaccctctttgtatgtgtcccatgagagtacaggattttacatggcttagagaaatactgtggtggtgaaaatatgcataaaaaagcgagagattttacttttgaaatgctgccaaagtgaaatctctcttggataggcagatgacagtttagtacttgcaggtctttcgattctgacaactgtcagaagtgaatttaagtgctggtgactaggctgccagagaaacacatgtaactctattcttatcaccccccatcttcagacattaaaattttcttgtgtgtaaaacataatgacaaatgaaagaaaggctgccagttcagaaccaatctcttttcacgctgttgcattgaggagaggaaaaaatcccttaaatttgaattccatgtggatgctcttatttaatatgccgtttcaaagcctgtatgtgatcaagccagagtattatcaggctctgagttcctgtgtgtattcccttggtccatgctccatctcaagtgtttctccacactgggataggcagcatattgtgtagtcttagagcagaaaaggtagaaacagattcttagtacaaacactggtgagaaaagcagcatattgtactgtggaaccacccgccgtctgccttctgtgggagatggggatcagcctcttcctggatctcttctttttattcgggtgctgggaggtgaggctgcaaaggaggctgttgtagagggagccctcctaaccatgattatgtaaacaatagctgctaggcaacttgttgtttgttttatgcaaggcagtgtgctaagcacttacatacatgtattctgtctgtagtttgttataagagtcctgcacacttaaccatgattatccctactttgcaaattacaaggttgcagtgcagagagcctaagacactttctcaacttgagcaagtaggagatccagaatttgaacccaaatctctctgaatccaaaacgactttttgttactttgcacacttcagtcataggaatttcagtgtggatttctgtattggttatgtattgccgagtaagaaatgactctggccaggcacggtggctcacacatgtaatcccagcacctggggaggccgcagtgggtggattgcttgaggccaggagtttgagaacagcctggccaacatggcaaaaccccgtctgtactaaaaatacaaaaattagccgggcatggtgatgcatacctgaagtcccagctactcaggaggctgaggcatgagaattgcttgagctctggggtgggcagaggttgcagtgagccgagatcatgcctgggggacagtgagactctgtctcaaacaaattactccaaaatttagtggctaaaaaacaacgtaaaacaagaaacatttcttttgtgcctcctcttttcctccctccctctttctcatagttaatttgtttgaatcaggattcaaataaggtcgatgcatttttaatctataggttttgtctcctttttttttttttccttaaaaaaatttcttttaatgcaacagatttaagggaccagggtgttctctagagcaggggtccatgacctctaggccacaaaccaatagcggagccgtggcctgttataaattgggtggcatggcagggagtgagtggtgggcaagcataggaagctgcgtctgtgcttagagccgctctctgtcactctcattagtgcctcaggtcctccccctgtcagatcagcaacagcattagtctcataggaccgtgatccctattgtgagccacacatgcaagggatctaggctgcatgctccttacgaaaatctaatgcctgatgatctgtcactgcctcccatcaccttcaagatgggattgtctagttctaggaaaacaagctcagggctcccaccgattgtacattatggtgagttggataactatttcattatatattacaacgtaataataatagaaataaagtgcacaataaatgtcatctgcttgaatcgtcccaaagccacccccactcctttgagtctatggaaaaattgtcttccagaaaaccacttgctggtgccaaaaaaatttggaaacctctgctctagagatttctgcagtctgtactttggtgattgcatctctgtggtgtcttttaacatactcttctgtctcctgagtttcctgtgaaagggtagataactcaagagactcaatcaacttcgtgtttaatgttttcgtaagaatacttcagaggcagtggtgtaatcgtccaagagtacacacaggcctgattgccaaagccagttttcttcaggcccagcacgtcctgacctcctcactcctctgcccactctctgtttactcactcccattttcattcattgattctgttattctccactaagttttctgggtggtcagcccaggaagcctcagcctgcttccagatagttctcctcagagttagcggtagcagcggtcgtcggccagtgtgtctcgggtcaaattattttgggcattactggaaagttccaaaccaaagcctgtggtaagttccacccaaactggcttgtgagggatatttttgtttaaactgcattcctggagaggagccagacttcctactgcctggcagcagtggtgtccataggagtatgaagagctgggaccctttctaatcactcagaccaaatattggggttttctgaaatggactgagaaataacagtatgtttttatgaggctttgcacattttccttcctagcagtagctgcttagtctactgaaaagtgcatattttgaacagggcctagaagagttaacagctcctagagagaggtgctctgtaatactttttcttcttcaaaaaatggtttatggctgggcgcaatggttcatgcctataatcccagcgcttttgggaggccaaggtgagaggattgcttaagcccagaaacgtgagaccagcctgggcaacgtagtgagacgctgtctctatattacaaaattttttaaaaaacggtttgtaggtccttaagtccctgataaaatagagaactgaattgcaatcctggaacttaaaaagttggtgacgacacctgagatatttattacttagattgcagttactggtcagcttgtataatactgaccaagggttttgattcttcctggaattgataggaaattcatattaaaataattacccaagtccaaacatttttagaactgcatttttgatcatggatttttatgtctcttctgaactttctgtcaccggtataatttaaagaaattatacttaagctttgtctcacttagaagataatatagaacagtggtgtttttttaattaaaaaaaaggttaaaataacggttttgtatccttgctttacttcttaaacatatgggaggaaaaaaaatctttaacaagtttatttattttcattttctgctaaattactttcagaacttgaatctactaatcccagatataatattcttggattcatattccaaattttgctgtctcaaatccatctagggaagtgggtgggctataaattataaataaattccaaattttgtgggatgaattaccctgaagaccaacgtgtaaattacatattaatctttctttttctccctagctcggttttaagaataatgttttagccaacatatctgcattactcttggctcaatatgagaaatccatttttggtttgcctaacagaagatcatcttgctttgcttctctacacagtatgaaaacccaaagaaaagaaaaacagaggcagttttttgctctaatgaatgctctaaatctagctcttaattatgattttttaaggaaaattttgaaaagtctacaagttaaatttttttttctatcccatacattttccatcctaaggcattgaaaaagcacactgtgaaatacttagtgtatctagaaacatcagggaagaatgcttccctcctaagcaaaattttgccttctgaaactttttcagcattcagtctttttatataatacttagaaaaatatttctgaaatagatcatacactctcttcccaaaaacatcaaagtatgaccgtaaagggcagaggtaggtaaacttcttgtaaggggccagagagtgaatatttgagaattttcagactattaagatctctgttgcaactgcttgcttttgccgtggtagcctgaaagcagccatagatagtatggaaatggatgatcatggcagtgttgcaataaaactttacaaaacagacaatgggccagattggccaggggccatagtatgctacccctgggcaacaacctgtatgccctggagtagtgtaaagaacgtgggtgttgggggtcaactgacgcttccagctctaccacttactggctgtgtggctttgggcaaactactgaaaatctctcagcgtcactttccaagtgtgtgtaatgtgtattttcacagtgctttgcaggttgttgattattgaaaatagccataatgcatgaaattaccagacacatctcactttatggagcctggggctattggtaatatgcatttctttctcatcttgatcgtaaaatgatcttagaaaggtttctgagaatatatagagtttaagacagcaataagacaactaattaattaaacaggaaaaggggatgttgtgctcagagaggaagtgtgggtctcataagggctttcacaatcgtttgagaggacacgtgtgatgtctcatgcctgttatcccagcactttgggaggccaaggcaggcaggttgcttgagttccggagtttgagaccagcctcggtaatttggcaaaaccttgtctctacaaaaattacagaaattagttgggtgtggtggtgcacacctgtagtcccagctgcttgggaggctgacgagtaaggatcacttgagccagcatggtggaggctgccatgatcatgctactgcactccagcctgggcaacagagccagaacctgtcttgtaaagaaaaggaaaaagagagagaagggcagaaagaaagaagggaaggaagaaaggaaaattgggcccaggaatgatctttacaatgcctgacaaccaagagaagaagggaaatgagcttcacattgcctgcaagctctagggtgacaagagccaagagaaattattgttactgtagtgatgttccactgaggatcataaagtactttattactctactgagtatggttttttgttttgttttttctttttctttttctttttcttttttgctattcttttgttattcttgatttatgctgatggaaagccatggacccaaggatgcttcacagttttctttcggagtaaatgcttagattccattttctttgacatgactatgtctgttcctcttgattttaggcatctttttcagatgagttgccataaaagcagcctgctctggataagtgaggtacagcaggacacactgcaaatactaggaatccttaagtacagtggaaccccagagcactctacctgctttctttctcacctccttaaaaactttttttgccctcacctcatcatttattcagcagtcacaacagtgccaagaacttggctagagattggaaataaagcttatgccttctctcatatctcctgtaccttatttctttcttacagtagttgtgatgcttagcagttttttgataactttttatgatgccaaccttcaaaaacctgcccctggtggagagaataattattacatcaattaggggtcacttagcatgacatttgtcggaaaaaaaaaagttagtgagcctttttgccatattaaaagtcatcactgccaagacataaatgaaaatgtgttcgaattaaccacaccaatgttcacaaaataaacatttttgatttcccaacagaatcctaggtttaactatcactatcatctttcatgaaatcaaagtcatatatgtaaattgaacacaactttcccttccatagagagtaaaaaccacgctttggagggtagatacaattaccccagggttgtcttttcccactcctcacaatcccaccagtgcacatgcaaggtgatgtccttcctttagctatagcaaataatgttaattattgttggtgttaaataatgattatgtaaagcactagactagacattcgtcggcaaagtttttctgcaaagaatcagatagtaaatatttttgctctcatcagccagacagtctctgcggcaaccattcaagcattgttgaatacattgttgagtgttacatgagactattgtaatataaaagtagcctgggacaacacataaataactgggtgtggctgtgtcctaataaaactttatttacaaagaacaggaagtggcttggatttggtatctggcctggcagctgtggtttactactccttggacggtggcccagagaccctttaaatgaaattcattttactagcaccctttttcatcatgagaaatatattctgtttttcttagaaaatgggttatgttaggtctggtcaaggtaaataagtgttgagagtcgatgttgtgtgcatagttaatttcaattctttgaagaaactcccccatgatatttcacggctgagagaagaggaaagagtttaagtggaacagtgtgctttgctgagctttggaaatattaccatatagggaagcaggtcaataagacaactaagtgctgtttcaataacgaagatactgaagcgctaattggagtatggaaccatataatgatgataataattgctaatatttatcagctatttatcatgtgtcatgtacagctaagcacttacataccatcccattttatccttataatgactctaagagtgggttaaaaaatggcagaagaatggcagtgtttaatggttcagcctggtgcaatgattaaccacattttacagactaagaaattaagaacctcaaccaagttcatgctagctggtacgcagtaaggctagaacttcgtccaaaatctcttcttctgttgagctcagcttgcatagtagcttggagaatcagaaagatctgtctcatttgggaaatataccatgtaaaaaacattgtttctaaaggagatttgtcccatgagtaaaatagatgatggacagccactgcctagtgggacaattagaaaggtcagttcaaggttggaggagatgcttctttcagccaattttcctttttctcaggatcacctcaggtgatccgcccacctcaacctcccaaactgctgggattataggcgtgagccaccgctcctggcctttcagccaattttctatcaccaaagggaaatcgttttgctggaatatgtgtaaaggaggttaaagtcagaagagattctcgtccgctcagttaaggtactcagactattttccaaccaatcaagagggtgctgcttcatggagttcgtttaagctgaagcggcagctgttgactgtcatttgcatcatctttatacatttactgtgaatgtcactgtccatttccactttctttctacttgtcttcaaattgatgcttatcaagtagacagaagaagaccaaggggtcgttttgctatttatacctccaaattgatggcgtgatcactctcaagtgcaaacccagccctgacactgtcctgtttggcaatgtcctgctatctgacctgcaaatagctacacttcctgctgtggcccacccaggcctctgggatctgatcccttctcccatgtcacctgtggccatgtcttccccaacccaggcttctctgctccgctgcttatgttctggatcctgactctgagcctttgcttgtgtggctcctctcccacttgtccatcatcatgtcagttatgtaagcatagattccaaagtgacaatgagggtagttaggatggcaagaggagaaaaaccaagctggattcatggattgcttgtgtcacgtcctctacagagcctcccttctacctgctcttacccgggcaccacagttgatgagttattttttggaccatcagcaacacacccaatcattgtacatggaatacttcggggatgcttttttctatattgattttacttcattaaactgagctccagaggagcagaaactttggctaatacatcttggtcttagcttgtaatatctgtgctacaacttattaagatggtgacgctggcaaattccttaatctttctaattcttaatttcatcagcaaagatgggaaaggatactaacaccactctgggttgttgagaggattcaataactgaatatttataaagcgtagtacctgatacttaataaaaaagtgaattttaacctgtgtcatcattgtcatcgtctttatcatcctttgcaattattacatttactgccttctagtacaaggaaggggatgggtggctggctggctaggtggatagaaggatggaagaggtaagtacaaggaaggggatgagtggctggctggctagatggatagaaagatggaacaggtaagtataaggaaggggataggtggctggctggctagatggatggaaggggtggaaggggatgcaagaggtaagtacaaggaaggggatgggtggctggctggctagatggatagaaggttggaagacaggaaggatggaacggaagaagagggaagaacaaaaatggaaacacatagtactgttaggtgaactgaacttctaaggtgccgattctcagtgatagaatcttgagttgatacctccttgggtggcatggagcctatacctttgtagatcttgggaaacaacttctaaagtaatcatagttgtatgtaatcgtagttacaacaatagttattttaggcacataacccaaaggttttcttacaaggaatctatgaaccttaagagtgagggcttctgttaagagtaagggcttccctggagtggacatggatcatgggactgagccagcttggcattgttgggttgaacagggagcgacacctctcagcccagtctatcaagcctgctctttgacctgcagtgagaccacccacgcagacatcaatgcagcaaatccccggcgtcagggtttcaacatttggttactctcagagaactctcgatttatataagacttggaaaaagggtttgagtttctgtggtttacaattatatttcccaacttggcccatgaatccagcttggtttttctcctcttagcatcctaaccaccctcattgtcactttggaatctacacttacataattgacatgttgagaagctgtgctaaaaccacactgaaatcacattttaataacatgggaaccatcttttcccagtaaattgttgagaagctaattcttgtcagcctaaaaacttgaatatacatttgaataaatcagcggtgctacaccgtggcagcctgctgaaaatccccaaggaagattatatttttagttgagctacttgtcactgcactgtgtttttaatattgtgagtcctttcttgtcttcatttttgaagaatctattgcataccttgtcattcagaaaaacataaacgggacctctcaattagcggtaaagttcgtcagtttaacttttaagcttaaactcctgttatagttcggtcacttactcgtcatcaaaaagatatttgagctgatattatgcaataatttataaccaaaaacaggaggaaaaggtctctgtttgtctcagaagtacaagttatgcataaggtgacaaattacacagctttgggaaatgggtcttaatggaatgcaccaggctaatagaaaagcagtgcctcgatttcccacctcagatctgaaaactcctgagagactgacagggcggttccccagcttggctgtgtgaggaatcagctgggaatcgaacactgcagtctggctgtcacccccaggattctaatgtaattgttctgcattgtggatcgatggatggatggatgaatggctggacagaaggaagacttggaaaaaatctttgagtttctgtggtttacaattttatttcccaacttggcccatgaatccagcttggtttttctcctcttaccatcctaaggagggagggagggaggaaaagggggaaggaagcaggtagaaagggaacagggaagggaggactggaggaaggaaagcagggatcattctggagtgtacactgggcatttgattttaaagcaaatccaagagatcattaaatttgtatcaatgaatacactgttacccctcaatcaacactacaattcatatatcagaatagcactttgttacttgtttctgagatagggctggctctgtcacccagactggtgtgcagtggcacgatcacagctcactatggcctcagccaccagggttcaagtgatccttccactcagcctcctgagtagttgggactacatgcctgcaccatcatgcctggctaatttttatttttgtagagacgaggtctccttgtgttgtccaggctggtctcaaacttctggaatcaagtgatcctcctgcccctgcctcccaaaatactgggattacaggcatgagccatgtccagctgccttgtttttttctttgaagagaatgatagaccttccataggaaaaatgttaaatatgtgtgtgcagaaataaagatttcaaatatttttgcaagatattttttctaataccacttttttctacattttccataatttagtgaagatagtaaattaacaaagtggaaaagactgaatattttaagaaaagccaagtttaaaaattttgaacctaatatttcttaaagtagctaaaattcagatattgagaataaattcaacttgacatggcaaaattctaataggctgaaataatgttttggtctagaactatgtagctttgtgtagcccatcaattgtctaaaaaaagagtaacctattttgatgaaactcgctgtatcttgtaacctgtatcctgtcttggtattgtgggagtatatatgatttaggggaaagagtctggagagaccttaagtctgctttagggaaagggtgaggaaccccactgaaggctacttaacgcattttgagaatgtcagtaaagatttctcagagcccagggattttttttttaattgagacataatttacatacaatacaattccttttttcttttttttgagacggagtcttgctctgtcgcccaggctggagtgtgatggtgtgatcttggctcactgcaacctctgcctcctgggttcaagtgattctcctgcctcagcctactgagtagctgggattacaggtgtgcgccaccacgcttggctaatttttgtatttttagtagacacggggtttcaccatgttggttaagctggtctcaaactcctgacctctagatccgcctgcctctgtaatcccaaagtgctgggattacaggcgtgagcccctatgcccagccaaaattcattattttaagctgtacaattgagtgatttttattacgttcacaaagttacgttaccattaccacttttgaattgcagaacaatttcatcactccaaaaagaaatctcataacaattagcagttattttccatcgctacttcctccagtcccaaggcaatcagcagtctgctttctatctctacctgtttgcctattctggacatttcatatgagtggagttagataatacatggccttttgtgactggctttcacttagcataatgttctagaggttcatttatgttattgcaaaaatcagtacttcatttctttttatggctgaaaaaaattccattatgtagatgtgccatatttgtttatctggttgtcagtcggatatttctgttgttcctactttttggctactgtaaaagatgctgctatgaacattattgtgattattataccttatttgtaaacatcatgggtggggggttgcagtaaacatgttggaaagtagggttggaggtccgtagaaattgggggcttcagcacttcccccaagctcaacaccaaccccctttctgagcccctcttgaaggagagttccctgggacgtgcctggtattggtacaatcagtcaggaagcatttttcctggggagaaacttacaagtccacgatcaaagccaacaagagacaaggtgttacatgactcattttcggtttaagaagtgacaggctgattctaagttgggttcaattattttgttaaagcgttttgcttatttgacttctcctgacctcggaaataattctaaccaatcagtgctggctcccattggccctggggtctggttgctttacagctggtgacagggggaccactccactaccacatgtgaattaatcctcaactccagagccaagtgccattctccagcaaggttgtatttcttcattagctattcccagggcccagaaagtcccagaggatgtcagagtacattaatttttatcataacatggaatctttcaggtctgaatggcagcacacggctgtcaggggcttctgaactctattacagctccatatatctctaggcaaaacagaggaaagagtcgtcattggcaagggagatgtacaaaatgcatgagatgttttattttttgagtgacttgaccacgtgcttaagcacattccccaaacaatttttttcttattgtttgtaagttgtaagttgtaaattcacctctgccaccacctattaaagcccactccctgcattaaaactgtataaagtgtatttaaataaactctctttgcatgatgtgaatgaaatcgtcatctggtacttaaaactattctataaagttattaaaaaattaatgttcccttcccatgatttttctgcagaatttatgcatccatgatactgcagaagttcataaataatggcttgtattgctgctttagtattgctttatgcctacgaaatataatgttaatttgtagcaatgctaatgtgttttcaggaaggctctttgtttattgcctttattttccccacttaccaagtgggtaaaatgctttgagggttgcattttatgtattcaggaggcccaggtattattttaatagaagcactattgacaaataccagtcatcccccctgtgccaggccctggatgaggcactgcttcgcatgggggctccccagattgtcccacaaggaaagcatagtcaaagacaaagttttcagttgtaagagtaaatgtgttctgcctaggcattgtcaagtaatttactgccagctctagcccttcactcaagtttcctggatacttttgacttcttagccatggatgtgtttgaaggctgcatggaccttcacttacttgcactgcaggtcagcctaattgcatgagctctgtggaccacagagcagggttttccaaagttcaccaagacaaatattgtattatcttaacatatattcattttttaaaactgaaaatcagaagagcaactccacctagcagaagtcttttgcaaagggcgaggcgaggctaaaaagtatagaagagttcgtttccagtgcaattttataaacacagatggtccttaaattaagcaaatggtacctaaatgactgtgttgtggataatggtaacagagggagggactcgggggttttttaaaaagtactgattgtatgcagtgttttaaacagataactgtgatcttagtgtgatgaaagatgctgggagatttcaccagtggtatcttattatttttcggggattttgtaattcaacaaaattctgttgtatgccaagcataaccctaggtgtgagagcacaaggtgacttcagataccacctctatccttcaggggtttggggcccattattatgacttaatccattttgggcgtgagaagctgagggtcacagaaagaaccaattccctctttaaataatgccaccccaaccctcctcatctgccaggtctttcccttcttctatttgtatgaataatagtcactttctcttgtggagttcgctaaattctactttggcctatcaaatttctttcatatcacaactaaatttcttaaggacgggactatggttcatttgtcagacgaacaaatgggaatttgccaagagacacttgggttaatttacgtcttttccatccaagggcactatgttgaagtgaggctagtaggtcatgagtgtggttgaagttactttttcttactttcccgaccagcccccatccttactgcacttaaagttgattgtccattttattaaatgtccccaggaagccagaacacagggcagtaaagtgctgaatgcaaagggcaggagaaaaatggaaacaaccagaactgtaacaccaaggaatgagacctgcatgtcagatatcatgcccattgcactaagtgccattggggcacaattatcaaatggatgcattttccctagaaaaccatcttggagagcatgtggatgtacttctattttacatttccccctatttacaatcaatgagattgagattttgttgctgggactgctgatgatgggatgggaaaatataatcaaggtaatggacatgaggcaaaaatttaaggaaatgacaaaaacaagagtatttccattttcagttaagtgtatgtactgatgttctggaattcactataagaagttgcaaatggtgcatgaaatgaaaaattcctggtggtctccaggggacacagccggtgctgtgctccactctgggtaactgttttggattattttctctattccaactgaaataaaaaaaaattaattaaatgtggctaggttatcttgacagcagaatccattcccagttaattattattttaatacttgatggtgtctgtcaaattgtcgacatgtgacggtcctttcaaatttaaaggaatagctgatggtcactggccacccaagctgatactgattttatatgttgatgtttctcattttatttgctctttccttgaatatttattcaggacattctctaccagacatattgagtaagggcaacagaaacaatacataagtatcttataaatgtggaaaacaatgtatatgtgttttttatctctcaatgattggtgggtaccatatccccaaagtagaatgagcatttgagaaaacaggaaatatcctcttttaggcaccatctctgtcaaggctgatgctgggctttttatatattttctctaattcttgtggctgtcaaacaaggtgggcattatcattccctttataggggacacagctgtggctcagaggggtttattcactttcctgagggccacacacataatgagaggcagacacaggtgacgaagtgagttttccctgtcacgccatcttatctgtcacatacctctctgacatgctaaaattgcactaaacaaaagaattctcttatgcacatatcatgcaaaagatattctttaactggggatcatgtttctcattccatcaatagaatgactaacattttctgagggtgtctcacgtgaaagtaaatcgctcatgtttgttctttttaaaagatgcccttcgtattgtgtatcttgcagtcttgctttctcaaacttaagccaactatatcgtcatttttgcaaaatcactgcgtcagtttactattatttaatgtttattgctaccaattttaagaaatcctttataggactatttgtgaaattgattttgtgaggatgatgatataatttccattacattacagcatataaatataaatatatatatatatatatatatatatatatatatatatatatatatatatattttattatttttttttgagacggagtcttgctctgtcaccaggctggagtgcagtggtgcaatctcggctcactgtaacctccgccgcccgggttcaagcgattcccctgccttagcctcctgagtagctgggactacaggcatgtgctaccacacccagctaattttttgtattttagtagagatggtttcaccatgttggcgaggatggtctcagtctcctgacctcgtgatccgcctgccttggccttccaaagtgctgggatatacattttttttttttttttgagagatggagtgtcactctgttgccgaggctggagtgtagtggcgcaatctcggctcactgcaacctcctcctccggggttcaagcgattctcctgcctcagcctccccagtagctgggattacagtcgtgtgccaccacgcctggttagtttttgtatttttagtagagatgggtttcactgtgttggctaaggtggtctcaaactcatgacctcaagtgatccgcccgcttcagcctcccaaagtgctgggattacaggcgtcagccactgtgcccggccggatagaaataatttttataaactccttggatgctacctaaaatcatcttgttttgctagtggcacatgctgcattttgggcagctgtggccttggtggattgctgaagtagatttgaccttacctggactgaggcagctgttgaagggaattgctgtgttcagtgtatactgccatccatgatttcatgaaaccagctctagctatttaagcaggggtcaaacttagaattctacattatttttttcccttttctgggaggaaagacagttgaacaccagcaaagactaagaagtttcttagaagactgtgggtccttgggccctttctattgaatttcagagtatttccaaatactatgaagtcttgcagcttagttgagaaatgccccagatggtgtgacattctgcttccaggagggattggaaagtatttccttttacataacattccactcagctcattcctttgctgtgtctgaaattgaatcccccaaagccacaattatcttaacattcagaagagtgtttatttaatctgcaaaatcttgcctcacttttggggagcatgttaacaatttcacttacaaatcttctgtgtaactcaaccccatggtggtgtctactgctgctcctagactctttaaagcacctttctcatctcaggtttgaaatgatatgtctcattcttgggttccttgagtcgtaatgggtttgtcttgtctccacagcataaatgactctttcttgatcaactagaaccacatcaacttcttccctccagcttcagtgatatattgtgaaacatggctattcaacgtcctgtagaccaaatgccataagaaaaatagcattgattcaaacgtatccatccagatacctaaaaaagttttacttcttaccacatcttgagtctgggcaaacacgcacttcctatggacattgattactgtctactgtagagataacatttgcacatacagattatggcacatggtagaaagtgttaagtaatgtaggaatggacatatcccaagcaaaattggaagccaagtcccctgtccctgctcaagttggtatgactggtgtatggtgccttaatgggtacttaaagtccaggtgagagtggcaggaggcagccaaatgcctaggtagataggagccggtccctgttgaaaccccacttccaagttgaagacagtttaaagactgaaagccaagctacaagttaaatcctcggaccagattgagaacttgtcttcttacttggtgcactcttctgattgatccccacctttcacctattttacatattcctgcccttccctaactggtttcctatgctgtcatgcccacctttgagtgttgccttcactttaaccttctgtgcatgctcacaaagtaattagcatgtaccctccattctgagttaatataaggccccagacccagccacatggggcaactttactgccttcaggtaggggaaccacccccaccacattccctctccactgagagttttccttttagttaataaattcggctccactcactctccattgtctgcatgcctaattcttcctggttgtgagacaagcagttggacctagctgagctaaggagcagaaagactgtatcacagggaacttgtgtaacagcttgatctcctgtcctacgtagctatctattggtaagaagttgaaggaacttgtgtcattccgttgtgcctgtcgtcttgaccttgtaaaaggtcttgggtaagcatgcaagaagttttgaagagggagatacagctaatttgcagataaagagcaagggaagaattcctggagaaaggaagagtttcctgagtcacctttgggaggtaggaagggtttgacatgtaggctgggcatctgggaacgagtgagggattctgtgagccccatctcagtggaccactcaaggaaggtgggtaagccctgggtataagtgtgtaagcagggaacagaaagtactgtgatttaaaatatgttaatttttctactgtacagatgagagccagcttggagatgggctgtagctcaagcatcttacctacctctgatttcttaatgccacgttataaggctgctgcttatagctcttgaagtcactccaaaaacagatgagtgagaccctgttgctaaagtcccactgggtgtagattattcacagatgtatacacagtggctcactccaggtaggatgtgatcagtgcttttagaaatacagaaagtcctattggtttaaaaaaaatttttttttgtaatgaattgagttttaaagctagcactgtacaataaaagggtgaatttcactatgaattatgacaaacacagtcatagagctgccatcatcactgtcaagatacagaacagtgccatcaccccccaaatgtcctctgtgccttactgtagtcatacctgctcctgacacctagcccctgggaaccattgatcttttttctgtccctagttgtttgtcttctctgcaatgttacataaacagaaatattctgggtgtcgcttttggagtttggattccttcccatagcataatgcatgcagtatttgtctgtttctgctaaattacccccaagacctagcgacttaaaacagcaaacatacactatctcactctgttagttttccattgctgttgtaataaattaccacaaacttatgtgcttaaaacccaaagctattatctgacagctctgtaggttaaagatttgtcatggttctcattgggctaaaattaaggtgtcggtatggctctgctgctttctagagactccagggagaatatttttccttgccttttccagcttctaaaggtcacccacaacatcttcaaaaccagcactgttgcatctctgaccttagccctgtagtcccatttccctctagccacaatcgggaaaggatctcaggactgttgtgatgacactgtgcttacctagattatctagcatgagctccctgtctcaaggtgatagagtttgcatgtttttctcctgcacatgccatgttgaaacataatccctagtgttggcggtgggtgtgctgggaggtatttggatcatgggggtggaaccctcatgcatgacttacggccatccctttggtgataagtgagttcacatgatatctggcaccttccttcctctgttgctcttgccctcaccatgttagctgcctactccccttttgccttccgccatgactgtaagcctcctgaggcctcaccggaagccaagcacatgcttcttgtagagtctgcagaatcggagccaattaaatctcttttcattataaattatccagcctcagttacttctttattgcagtgcaagaatagcttaacacacaaggtcttacccttgatcacggtctgcagcatgtcttttaccatgtaaggtaatatgttcagtggctgtgggggttaggatgtggacttctttgggggacttttatttttcccagttactatttttgtgactcaggaatttagggacagtttggctggttgtttctggctcagggtctttcttgggctgcaatcaagatgtcagctgggggctgggcatggtggctcactcctgttatcacagcactttgggaggtcgaggtgagtggaccatttgaggttaggagtttgagaccaacctggccaacatggtgaaacgccatactaaaagtacaaaaattagttgggcatggtggcacatgcatgtaatcccagttagttggggggctaaggctggagaacagcttcaaaacaggaggcggaggttgtggtcaactgagatcacaccactgcactccagcctgggtgaaagagcaaggccccacctcaaaaaaaaaaaaaaaaaaaaaaagttagctggggccaaggtcatctcaagtcttgactatgaaaggacctaacatcatgcatggctgttggcagaggtcacttcctcatgagcattaaactgaaagctataattcctgactattgaccagaggcgaacctcagttccctgccatgtgggcctcttcatggggcagttgataacacagcagttagcttccattggattgagtaagcaagagagcaagaacaggagtgatacagaagccagcatctttttgtaaaccaatctcagaagaattgtccatgattttttctatattctgttagttagaaacaaattcctaggtctcacccacccttgaggtgaggggattacacaaaagtatgaaaaccaggaagcagggagcattgggagtcatttggaccctgcctaggacagtgcgtttgagatccatgttattctatccattagtagtagtttgcttctttttaatgttgagtaatatgccattgtgtgtttatatattgctaatggattttaaagagggctaatcaacgtgttgattagagggaaattttcttcagtgaaataatatttgagcaaaaccttgaagaacaattaggaatttgacagagggaatggcacgaataaagacccagacttaatcaagtgaggggcgtactcatccatggggcagtggatgattcacctgcctggagcttaaggagaagggggtgtagttgtggctgttgctcagaaggacctgaatgtcaggatgcatttgtgtttaatttagcagacatttaggaaccattaaaagtttttgagaatgggtaggtaagattagaatagtattttaataagtttaactaggctttaaccagtattcataaaaagtcaagtgggagaatgtagaggtgacaagaccaggtgtgggctattgcagtgactacacctaaaaggaacagagctagaaacatggagtgacatgaagtcattgtcttaggttggtgatcctagcagctgagcctgggatggggattcttgttcctatgatcgattaggggactgttcccagaggagagcggagagggaagcaggctttggtttctactggaaatctgtttccgcccgattccatggggagctctggagaaggaattgtatcaccgagttggtcctccttgtcaacagagcatgtgtgtgggggtgatgacttcccagatgtgagggtgccctccagcaatggacagttatctggaggagttcatgctccagaggtagtgcctacctctgtggagaagtaggggatggcacggtattttaggggttcctaatgagcctagagatactgacattgaccagtcatggagactaaaggagaagatgggatagcacattgttttcctaagtatttgtaatcaggtgactggtttgcaaatatcagccattacagaaataaagggtatcaggacggggaggagatgtgaggagagaagatgaagagtttagatttaggcatgttgaccctgaatttgtgggaaggtatccaggaagataagactgacaggtgggaatgagattctggaacttggaaagaatatagtggctagagctaagggtttgaagtcttcatggcgattttgttcggagtcatggatttggaagaaactgctgcagggaagattttagagatggaatgaaaagagattggtgatggaacaatgggcaaaagaggaagggttggaggagacaaaaaatggagtggtagtggcattgggaggtccaagagtggatggtatcacagaagccaagacaggaaagtgagccagaagtgagggaggagcaggatcctctgcaacagggcagtctagtcttagcagagaggaggttgctgaatttattgattgagaagccactcctcgccaggcagttttgagaggttctggatggtgatagaatggaattcattcagctgatgatgagaagtagatttgggtcagggaaggagactgaatggagatgaatatttcaaaactatagaccataaatgggaagagagagacgagtgcaacctgcctaggtcaagtgaatgtccttttttctcttcccagcccttgtcttttttaccctctttgttttctgcatttctttccttctgttctgatttttccttacctgatggtcagaaagatctgattgagctgacgcgtagcaagaatgagccagtggagaggaaaatgtaaccacctaatgggttctcctttcctgctagctggacagagctgatttatcaagacgggggtactgcaaatagagaaagaatttaatccacacagagccagctgtatgggaaaccagagttgtactactcaaatcaatctccccgagaattcagggatcggagtctttaaggagaaatgtggtggatagggagccagtgagtgatctgggagtgctgattgtctcacgtgtccatgtgaagagaccaccaaacagggtttgtgtgaacaacaaggctgtttatttcacctgggtgcaggtgggctgagtctgaaaaaggagtcagcaaagggtgatgggattgtcattagttcttagaggttttggcataggcggtagagttaggagcaatgtttttggggcagcgggtggatctcacaaagtacattctcaagggtggggagaattacaaagaaccttcttaaaggtggtggagattacaaagtacgttgatcagttaggtagggacagaagcaaatcacaatgggggaatgtcatcagttaaggctattttcacttcttttgtggatcttcagttgcttcaggccatctggatgcatacgagcaggtcactggggatatgatggcttagcctgggctcagaggcctgacactgatttgttggcttgaagatgaaatcacagggaatcaaaggtgccctcctgtgctgactcagttcctgggtgggggccaaaggactggttggcaggtctgcatggggccaccgtgttgtcagaaatgcaaaaatctggctggtgcaatggcttacccctgtaatcccagtactttgggaggctgaggttgtcaggcctctgagcccaagctgagccgtcataacccctgtgacctgcacatatacatccagatggcctgaagcaactgaagaactacaaaagaagtgaaatagccagttcttgccttaactgatgacattccatcagtgtgatttgttcctgccccaccctaactgatcagttgaccttgtgacattcctcttcctgaggcagtgagtctcaggagctcccccaccgagcaccttgtgacccccgcccctgcctgcaagacaaaaccccctttaactgtaattttccactacccacccaaatcctgtaaaactgccctacacctatttccctttgctgacccctttttcaaactccgtctgcctgcactcaggtgattaaaaagctttattgctcacacaaagcctgtttggtggtctcttcacatggacacgtgtaacagaggtgggcagatcacttgaggtcaggagttcaagaccagcctggccaacgtggtgaaaccctgcatctactaaaaatacaaaaattagctgggcatggtgctgtgcacctgtaatcccagctactcaggaggttgaggcacgaggatcacttaaacccaggaggaggagattgcagtgagccaattgcgccactgcactccagcctgcaatgcagagtgaaactgtcttaaaacaaacaaacaaacaaaaagcaaaaatctgaaaagacatctcaaaagccaatcttaggttctacaacagtgatgttatctgcatgaataattgagaaagttgcaaatcttgtgacctgaggaataacggctggtaattatttaaaactcaagcccctctcatcctaacgtggtggcctttcattcattttacaggaacagtttagttttgggggaaagctgttatttaaactataaacgaaatttctcccaaagttagcttggcccatgcccaggaatgaccaaagacagctaaccagttaccggaaacgggtcccaatctagaccccaagagagagttgttggatcttgggcaagaaagaatttggggtgagtctataaaattaaagtaactttataaagaaagtaaaagaataaaagaatggctactccataggcagagcagcaactttggctgttggactaaggatatttatagttaattattgattagctataatatattttaatataatatatataattataatacaatattatatataatatatattttatgtaactataaacaaggggtagattactcatgagttttcacggaaaggggtaggcagttcccggaagtgagggttcttcccctttttagaccatatagggtaacttcttgatgttgccatggcatgtgtacactgtcatggtgctggtgggagtgtctcttagcgtgctaatggattcatattagggtataatgagtagtaaggatgaccaaatgtcgttgccatctttgttttggtgggttttggccggcttctttactgcaacctattttatcagcaaggtctttatgacctgtatcttgtgctgacctcctatgttatcctgtaacttagaatgcctgacctcgtgggaatgcagcccagtaggtctcaatcttattttacccagcccctattcaaaatggagtcactctggtttgaatgcttctgacaaacctctgagactaaggacaagatggagtctgttaggttagttttaatttcctcagttattatttcacaaagggggtttcagaaagatagaaaatgctagaaagagacggggtagtcagtggtagggatcttgaggggttaaaaaagggaaggagctggtccctttgcagtaggaagtgccacctcactccactcttgccagaaagcctggctctgtcataaggaatcttggcccattgtcactctcattgatgacaacccccgcccccaccactaccaccttaactactgaggggatgtcctctggcccagaaggaatgcattggctctagttgaaggggttgctggtttgtaaatagcatccccacagtcagcagacacagagaatgccatggggccactcatcagaaaggtggaggggctttatctgtgggtagatgagagccatgtagaacctgcatgctgccttccattggaatctcaggctctaaacaaggaggacaaccttttctgcccttaatcacctctcacagatgagaatccacccaagaagaagaaaaaaaatcagccccttaaaatgctgactagtaacatcagtttttggaaggatactatttttgtttccattctgtctttatagtttgaacttttccttttcatagtctgtaaatattcatcatctcagagccttttgaattgcaatggcttttagtcaaaactgagcgcaatgtgccatttgaataataagaacctcattaaagtgaggcaaaagtaattcttttccttttgtacaagccaattaagtgtctttacaattaaaacaaagtcaagcactttatagtttcatattccacaagcctgtttttaattaatagaggtgacaagttttaggtacaggatacatattttgcctctggagttgtgcaattaacattaatgaagggtattaaaatttggtgagagaggaaagggttttcccaggtcctctgtgggttcttgcctccaggcctgtctttggtagcaagttccttggtttgctgaggtttgcattttcttgagagaatgtacaggcaagaataaaagtaactagaagagacattgttgttattgagaagtatgaagttaaaattcccaatgtccaggcctgtcttaaaattaggtaaacactgcagaaactatctttgaggaatttaattttgtcttgtggataaaagtgaaggataaagaggagaaataacaattatctaagctggcaggccagcaagatactggggctttacttctcacaaccatgggaggagtatatttagtttacaggggaggacacagattcacaggggtgaactaactggccatgagtcaggtaaggaaaataacatggctgagctacagtttctctaagaagttggttctgtccatttcagggagcttatgtaagacagaaggtattgtgcagtagccttgaagtcaggtgaccctttgggggtgtgtgtgtgtttgcttctttatattagcttttttttcattttgagacagggtgttgctcttcctcagttgcccaggctggagatcagtggggtgattacagctcactgcagccacaacctcccaggttcaagagatcctcccacctcagcttcccaagtagctgagactacaggtgcatgccactggctatttttatttttttctttttagttttgagtttttaattttttgtagagatgaggtcttgctatgttgtccaggttggtcttgaacccctgagtccaaaagatgctgctgtcttggcctcccactgtgctgagattacaggcatgagccaccatatctggcctatgttagctatttctgaaacttcatttctgtctgtaaatggcaatcataatatatgtcacgtagggttcttaaatacaaaaagctcttaaaaagtgcctaacccatagttagtactcaaaaaaggaaaaaaaagtattaatagccctggaaaagtgagcaaaatatttcagatgcaacctgaaaggagttcaaatgtaagtctctcttcactttgcccatctttccctcttccccgcaaggtttttagcagtggtcctgtcttactacaatatatgaattatccctgctacaaattagtagattctgctttgatttgaagcagagtctaatgagtgttacaggtaggctcggtgcttcaaaggatttctgcctatctcttcacagagtagctgggctattgagggactgtgtattgacaattgtagtgggcaccctatgtggaaaacaggtgttgtcaaataactgcaactgaccccaaccacaccatgacttttcaggttttaggtaggggatgggtgggaaaacagatgaggcaacagaatgaattattccttaataagatccagattaccgagtgataataagatttgcatgaatacttcaaacaacaacagtgattaaatacgtttttctagttaaaaaattaatgagtgctttccagcaagcgcttaaagaattaatactggccgggaacggtggctcacgcctgtaatcccaacactttgggaggctgaggtgggtggatcacgaggtcaggaggtcaagaccatcctggctaacatggtgaaaccccgtctctactaaaaatacaaaaacaagattagtggggcgtggtggcgggcacctgtaggcccagctacttgggaggctgaggcaggagaatggcgtgaacccgggaggtggagcttgcagtgagccgagattgcaccactgcactccagcctgggcaggagacagagtaagactccatctcagaaaaaaaaaaaaagaattaatatcaattttccacaaactcttttaaaaaaacagaagaggaggaaacactttccatctgacactgtgaagccactattactctgacaacagaggcagacaaagatatcacaagaaaaggaaactttaggtcactttcacttataaatagagatgcaacaattttgtacaaaatgctagcaagccaaatgcagccacatatacaaagaattgtatattatgactaagtggaatttatccaaacaattcacggttggttttatattaaaaaatcagtcaatataatataacataatagtagaataaaagatcctctcaatacatacataaaaacatgttttaaaaaggtccagcacgctttcttgatgaaaacttttagtaaacttggaacaaagtggcattttctcaactcaataaagggcatctgcaaaaaacccacaaatgacatcataattaatgctgaaagattgagtaccgtccccttaggatcaagaaataagacaaggatattcactctcatcactttaatattctactagaaatcctagctagggaaattgggcaaaaaacaaaaaagcaaaagaatggaaaaaaaagatccagattgaaaagaagtaaaactatctttatttgcaaatgaaatcaccttatctgtagaaaatcctagaaaggtacttaaaaaatattaaaatgaacaggttcagccaggataaaagtaggataaaagtttaatatgcgtaagtcaattgtatttctatatactagcaatgaaggcatcccatgttcatgtatcagaagatttaatattgtatagctgaccaaactctgcaaattgtgtacaaatttagtgcaatctctattaaaatttcagttgacttttttacagaaattgaaaagctgatcctacattttgtatatgaatgcaaaggaacctgaataaccaaaacaagcttgaaaaagaagagtgttggagggcttccatttctcaatttcaaaactttctataaatccttagtaataaagacagtgtcatattggcataagaatagatctatagataataaaatagacttgagagtccagaaatgaatccatgcatattgtgaattgattttcagcaaggatgccaagacaattcaaaatagtcttttcaacagtgatgctagaaccactggatagccccatgcaaaagaatgagattagatcacacttgcataaactacacagcaaaaaatagcaaaaaaaaaaaaaaaaaaaaaaaaagggtcagagacttaaatgtaagagctaaaactatacaactcttagaagcaaacataggggtatatttttctgattttggcttagacaatgatttcttggatacaaccctgacagcacaagtgacaaaagaaaaaaagatatccagaatgatccagaatgaaaagtgtttgtgctgcaaatgataccatcacgaaagtgtacagatgacctacagaatgggggaaatacttacaaattaaatattaaataagggatttgtatctagaataaagaacttttacaattcaataatgaaaactcatttaaaaaatgagcataagatctaaatagatattcctccaaatatgatacacaaattgccaatgaatacataaaagatgttcaatctcattagggaaatgcaaatgaaagccacaatgagattccacttattgctaggatggctaaaataaaaaagtcagataacaaatacttacaaacacatggagagatgaaagttcaaatacagtcctggcggaaatgtaaaattgtatggccaaactggaaaacagtttggccattattcaaaaagttaaacattgaattaccatatgacccaataatcccactcctagatgtatcttgaagagaaatgaaaacatgcatttccatagcatcttacaaatgaatgtacatagtagtgatattcctaatagccaataaatggaaacaatccaaatatccatcattggtgaatggataaacaaagcgtggtatattcatataatggaatattatttgcccattaaaaagaaatggattactgatatatgctacaacatggatgaaccctgcaaacatcatgccaagggacagaagccagtcacaaaagactacgtattgtatggttccatttagtatataaaatgtccggaataggcgaatctataggacagaaagtacactgatggtgttttgggaataagagtgtaggtagatagagggtggctagtgattgctaatttttttttttttttttgagttaaaaaagtgctataaaattagaatgtagttatggttgtacaattatttgagtatactaaaacagctgtacagtatacataggtagattttatggtatgtgcattatatttcagtaaagttctttaataaattagctaatgcttattgtagaaaagttggaaaataccaaaaaccataaacaggaaataggaaaaaaagtaatcctgactgtatatctggaaatcttttcgtggggtatggggtatgaatcacacatattaattttaatttcctgctttttcaattaaattgagaaagtttgggaacctctggcttaatcattatttatccacttctctgttgttggatgttagattgcttctagttcatatgtaattttataattttagttgacatgtcattatggattcttgggcataaacgtttatatgaattttgaatattaggaaataatcttggaagctatattagttttctaaagctattataacaaattaccacagatggagtgcctcaaaacaacagaattttactctcttacagtttcagagaccaaacatctgaaatcaagtggtttgcagcgttggctccttctggaggctggaaggagcatctgttccatgcctttctcctagcttcccatgactgccagccacccttggaatttcttggcttttatcttagtcagtctaatctctgcctctgtctttccatctccttctctgtgggtgttccttctccccttctgttttgtaaggataggcctgtcattggatttaaggcccaccttaatccaagatgatctcattttaagatgtgggacttaatcacatttgcgaagaccctttttccaaataaggtcgcattcacagatccctaccattcaactcactatggaagcaatgggatgggaggtaccattcaactcacagattcctaccattcaacccactataaagcagtggcatatgaaaaggatgggaggttgctatgggaatggtctgccccagatgcaggtaaaatggggaagcattttatatagaatggaaaaacaacagtaaagctggctaaaacttgatctgctttttacagtcatgtgctgacaattctaaacattatcaatgataaaatacttctccctcatgatattaactgtgcaatttttgctgcccctgctacatacatgctttattgcttggaaacaggattacttggtgaaataatgtgaatctttcaattctcatgatacatgttttcaacttaatatccagggtgcaggaatatatattcccaccaactttatacaagataatacaaatataatagtatgaataaatatgctaatttgatagaaaatattttaatatttactactagtgtagttggacgtgttaaatattgcaatggttatttgtaatctacctttataaaatttctaatgtctgccactgtttctgttagactcttaagaagatacgtgtttgtctcatagatttgtaagaactctttatatactaaaaatatggggcttctatatgattgcatatattcgtcacttttgttccactgttttagagagcagaagattttaatttctataaagatttttatgtttccctttattgcatgccaatgtttgttttttaaaaacttgtacgtcttaggctgcgatgtgaaaagtgtcttttttttgatttggaaacagagtcttgctctgatgcctgtagtggtatgatcatagctcattgcagcccttgaactcctgggctcaagtaatcctcctatctcagcctccgaagtagctgggactacagccacacaccaccacacctggctcactttcgggtggttgttgttgagatggggtcttgctgtgttgctcaggctggttttgaatactgggctcaagtgattatcctgccttagcctcccaaagtgctggaatttcagaggtgagccactgtgcccagcctcctgttttttttacatgtatatatatatatatatatatacacacacacacacacatatatatatacacacacacatatatatatacacacacatatatatacacatatatacacatatatatacacacatatatatatacacacacacatatatatacacacacatatatatacacacacatatatatatatacatatacacacacacacacacacacacacacacacacacacacacatatattttttttttcttttagatggagtgtctctctgttgcccaggctggggtgcagtgacatgatctctgctcactacaacctctgcctcctgggttcaagtgattctcctgccttagcctcccaagtagctgggattacaggcgtgtgccaccacgctgggctaacttttgtatttttagtagagatgggggtttcaccatgttggtcaggctggtcttgaacttctgacctcgtgatttgcctgcctcagcctcccaaagtgctgagattacaggcgtgagccgccatgcctgcccttatttttatatatcttccataacctttctatctctttctttctctttctctgtttctgtgtgtgtctgtgtctgataataaaatacattaaattttattttataacataaatgttttataaggtcggtagatttgtttatgattttaatggctgcatagtattctatcatatggatatattctaaatgtaataattcctcaatggtatatttagtttactttatatttgctgctttagtttgtcacaaacaccgtggatagccttgtatatatttattttgttgtatagttcttattggtacagtatgatttttcacaagtatacaattactttctgagaatttagctttttgattcacgtgaaagccttacttgtattgttaacaattttgttacgtttgtgaggcctaggcagaaggattgcttgagaccaggaactcaagaccaccttgaccaccttgggcaacatagggggagcccatctctacaaaaataaaaaataagaaataaaatagccatgcatggtggtgtgcccctgtagtcccagttactcgggaggctaaggtggaaggatcgtctgagcctgggagtttgagactgcagtgagttatgaccacaccactgcactccagcctggatgacagagaaagatcttgtcaaaaaaaaaaaaaaaattaaatatatacaaaataagggagaatactatgacaggcttccacttacctatctttaggcttctttataaaatgttcatttaatctgatctctataagaaattctgtatccttaaacaacatgtgcccttctctttacacagagcgattacccccttgctatgttttattaacagctagcaagtgctgggtcctgtgtcagttgttttgttttttctttttctttgtttttcttttcttttcttttcttttttttttttgttttttttttttttggagatagagtcttgctctgttggtcaggctggagtgcagtggcatgatcttagctcactgcaacctctgcctcctgggttcaagtgattctccggcctcagcctcctgagtaactgggattacagacatataccaccacacctggctaattttttttgtgttttgacagagatggggtttcaccatgttggtcaggctggtctcaaactcctgacctaaaatggtccacctgccttggcctcccaaagtgctgggattacaggcgtgagcccccgcgcctggccctgtgtcagcctttttaacagcataatttttcctttattagtcataactactttaagggctattttgatttacagacaaagtgagacttggatgaattaagaaagaattaatcaggtggttgaacctgagttccaactagggtgacaactcttcgcagattgcctgctgctgtcctggttttcacactgaaagttccgtatcctaataagcctctcatcctcagcaacggaggacagttgcccactcaaagccttgtgacattctagggtatcctatttctacatggtgggaatctagaagacggagaaagaatttctcattcccgaaggagcatggattatccttggttgtagtgtttatgtccacatcacgtggattcccgaaggagcatggattatccttggttgtagtgtttatgtccacatcacatgggatattttatttttcaggcctcttcatgtgcttgtgtgcaacgcagcaacttttgctctaccctggagtctcaccaaagatggcctggagaccacctttcaagtgaatcatctggggcacttctaccttgtccagctcctccaggatgttttgtgccgctcagctcctgcccgtgtcattgtggtctcctcagagtcccatcggtgggtttgaattgcatatttgttcacttatcccctttctcataccagctaatattcccccaaggctctcattctgaaaataattttcattagtcctgcttgagacatgtgggtggactcagcttggctcacttaatttttccaggtcttttttgttcgcctgtgattgtgggggactgtttagaaggactttctagagcaaggaagattgtttttacgactatacttcaagctcctcattgattttgcttagagatggaataataattgatgaaatctgaatggcatgacctttattgatttgtaattcaacaacttcaacatcttaccaagaagaatgtgcagttattctagcaggagaaacaatgcaattagagcctgcgagatgaaatcaaattgttttataatgagaaattagggaattcgaggcagacattagctgtgtaattgtggaaagggaagaactgtagttagagcatattagaaatctggccgtgcctcttttggttaaaatttcaattaaaacatcagatggcacttttttcctattgccattaggagaatattcaattgactgaaaaggacatttgaaaatttcctcgtattttcagcatatttgtttctagagttggagaaacaactatttgtctagagagaagtactctgaaaagacaaaggccttgctgggtgaggctggatttaatacatgttagggagatttctctttcacgtttgcttggtgtgtgtttggcggggggaacttacactcttagcaaagtagctagaaaaaaaaataacgtgcaaggggcctattttttcctccttcttctccgtcttaagtcctgaaatgttttagtgacccagaatgaagcttatttttttaatcatacttccataaaatgtaacccctgggacttggaagagagagaccagccaagggttagcttgaaccctttatcactcccaaacacaggggcttatggtataagtgacacactgcagatagatttacttttgccattttaaatttatgatggctgaaatgaaaggtaaatgccagtaataatcctcccccgtgttaaaagacatgaaacatctagtaattaggtggtaacaaaatctggacagccttatctttgcaaatcacaccaggtttgtgaaggaaagtggagtggccctgttaaggggcgagggaggctactgtgggggcaggcagcagagagagctccagaaataaatctgccagccccagtcatccaccagatgtggagggcaccacgggatatgtttaaatgagctggtatttaatgggagattatgtcgaattgtcagctgctcactctccttgtaaatctgtatctcaaatggtatttcgtgtgacgtctttgttctttgcttaactacggtgtaattcatgcctacttcagagatccaaatctcagcatcatttaaaagattagtttgaaaggaagggacttgggctcttgaattagacctatgttagtttatagggaggccttcctgaaatgtgttgtcaggcttgctcctgtgtgatggctggcactggttttatgctttccaattattctttgcacatcgttatttattattactgttattattatttgacatggagtcttgatctgttaccaggctgcagtgcagtggcatgatctcggctcaccacaacttcagactcccagggttaagcgattctcctgcctcagccttccaagtagctgggaccacaggcgcttgccaccacacctggctaatttttgtatttttagtagagacggggtttcaccatgttggccaggatggtctcgatctcttgaccttgtgatccgcctgccttggcttctcacagtgctgtgattacaggcgtgagccaccacgcccggcctctttgcacattatttaagggtgttttaacaaaatggcaatttccccaggctggcttgtgtattaccttcgcattgcatcccttggctcccatgagtgagcgtggtgacttggtgcgtaggtggtacgtgaagacagttgctcactacccaagaactcagggccctaaaccatgctgtaaaatgcaagtgctgatatctaattacctccatcaaccttggcagaatctcttcgttggagttaagaccccctgttaggggaaaaaagaaagtcctatgtttgcagaaaatattatactagactgctccaaggcaaaatatttattagccttcctgtgtcttcactgtgttttagttacttatctggaatctgagcaactgaattgagtttctgcatacctaaaatacatcatagtgaaatgagaagttgacttctttgctgtgaaaaaatttcagataacaattaaagtagaatgaaaagagcagagtgctggttgaacaaccctcaatggctgcagctgcatggagtgccaaattgccctcccccaccccacacacaaaatcacacatacacgcacgcacgcacacacacacacacggagtttctcagcttctgtgtagacagaatccagcctaattattttaggcgggaattttaaaaatcctcaataaaattgggcttggtagcacatgcctgtaatcctatctagtaagaggctgaggtgggaggatggcttgagcccaggagtttgaggttgcggtaagcgttgatcatgccactgcattccagcctgggtgacagagtgagaccccatctctaaaataaaaattaaaaattgtttaaaaaaaatgcagtataggccaggcacagtgtctcacgcctgtaatcccagcactcaagagttcgagatcagcctagccagcatggcgaaaccccatctctactaaaaatacaaaaattagccaggtgtggtggtgcacgcctgtaatcccagctatttgggaggctgaggcaggagaattgcttgaacttgggaggtggagattgcagtgagtggagattgcaccagtgcactccagcctgggtgacagagcaagaccctgtttcagaaaacaaaaacccaaaaagcaaaacccccacagtatatatagaaatacaagatttgtgaggggcgggggtccccctacaaagcaagtgttactgtccacagagcaaatgtcaatattttaatgtactagtaagggaaaattctattaagacataattgtttggctttgtcagtttgtcaacttgaaaatagagtcagcagcatctaaagagttgttttactacctctggagctgagaggtgaacatagtcgtttttcaggaagccgtttctggctcagacagataagaagctggcccacccttgccacttcctggaggactgtcagtgctagctaatgagactgtaaaagtggactatctgcccaggagacagtgaggaaggaaatcaggggtcacccttacagggaagggctctttgcagagagagtgcctgatacgtagcagctggtacttctccatcttgaaactgtccttcctggttttgtctaatttgtcatcatgggattcttttgacttgtttctagattagggatcaagaagaaatgactttctcctcttagacatttaattcacttagtgttccctagtcatgacatacttctgtgttatccttaaatactgaaacagggaccttattcttaacagtagaaaatcactgtgtatgatgatagtgtatacctgtaataccagctactcaggaagctgaggcaggaggatcccttgagctcaggagttgagattagcatgggcaacaaagcaagaccttgtctctaaaagaataagcagaaaccaaaagccctaaacatgaggaaattccacatgtaaacattaatggaaaacatagaagagttgaacctagtggtaaattttacctttagagcaatgcttgaaacaagggaaactgtcaaattctcatcatgggatttgtgttcctttgttttttttattaaggacttggtccttggattggaattccaaacccatgaccaaactgtaatcatctaattctgtattgagtccttactatgtgtcaggcactgtagtaagcaacactcaagaatcttacagtctactttccaagaattcacagtctagttttggaatcaggtgatcaattgacttacagtctggtatggtgatgacagaggagcaatgtacagatagaacagaaggatggcacagtgagccttttcaccaatcttggaaggccagtaatgtcagtgaacactaggaatggtgtcatggcctgggtcctgaagagtggatacttaatgtccatggaggcatgcatttttatctgccttgcatggcttctttcattctctccctgacttccacccaaaaaatcaccatgatatccagctgtggaagagttcattatggagagcttcctggaagaagtagtccctgaactgggttgggctaaacaaatatgccaagaagggtttctggaagcagttgacaaaagatgagtagagagagggagggggtggtgctatatttattccatacctttcagatactctctaaatccttgtccctgttgtctatgccatgtaggtagagttttcaagtcatgtcccataccttggatcattggattctcaactcagtagcacctttgtgtgacacctcttctgtaataccttattatgttgaaataaagttagcaaataacataacttacatgcacaaatatattttcaattcgatatgatagctttactgtaatgaaagaaaaaataactgaaacaaaatggcgtgtgtttcaacatgtaaatgcttgggccaggctacaggaaagatggggatgtatgtatccgtggatgaatcaccttgaatggactctcataaaaaagcccaccattaccaggtgtgtggtattgcagactccagcaccaccaaccttgagtgaagcctgactatattagtctgttctcatgctgctaagaaagacatacccgagaccgggtaatttataaaggaaacaggtttaatgggctcacagttacacatggctggggaggcctcacaatcatggcggaagatgaaggaagggcaaagggatgtcttacatgacatcaggcaacagagtatgtgcaggggaattctcatttataaaaccatcagatttcgtgagacttattcactaccatgagaacagtatgggagaaagcacccccatgattcacttatctccacctggctctgcccttgacacatgggggttattacaattcagtgtgagatttgggtggggacacagccgaaccgtatcagtcaccctccaaaaatcacacaaaatctgaaagtgcttttattcattctacatgtaaatagttgttgcactacccacctggaaattcagtggatgtttctaggctcagataattatccacaggcttttcatctccatgagtgtccactggggcattcttcattgagcaatacatcatgtgcattgcaagacatctgccatccctgctaccatcaccagcagtcatcacgacaaccagaagaaggccgtcatatattttcaaattgcctgctgagttccattgccttagacaattaagcttggaagtcagactcttcctgtggtttgggtactagaaaaaaggcagccaacaattcgtttcaaggtctcatttctgtatccttgatgacgtttctggccatcagctttgttgatgactttagagcagctatgtcatttaacactagaaattggatgtcaccgagtcctgtggaagggatatttaatttccattaaaacatgaatttcattctgcccttgccatgcttttcttggtcttagcccaacctgagctgctgatattaaggaataataggataattccataattttcattttaccttttgctttttgttttccatagcagttatctagaggattcccattatgcttcttcattacccggtgcccagaatgaacttatagaagcagaatatgaggggtcctttgacaaacatgagactgtttagaaaattccttttgtttgctgtgatccattttgtaagggaagtcactataatgttgttatttaagagaaagagacaaacggaaagaaacaaacagctggtgtttaacgactccgtcagacccaattataaagcatcaactagttacgttgatttgtgtacatccatgccatgggtatacttaaaaacattagattttgccagaactcatcttggctttgtttacatttttcttttaaacgtataagactattgatggtacctcaccaaggttataacccctttataatcattaatttttaatctagaaaagagtcttggagacaacaagactcatctataatttcttggatgctcaaatgaaaatatacaggactcaagcattagctaaaataatccaggaaagccctgtcaaaggttaggaatgtgatatctttctgtttccaaaagcagcagccctttattcaagacacttttctgtttaatttaattatctttgaacttcctgttgaaggttttgaaaaatatatgttagagggtggggagagagttcagtatgtcaggactgctacatttatgagtgtgggtctttattgaagtctctctttgtagccaatcctttttttttttttaatttttaaattttaaattcttacttttagatatgggggtctcactctgttgcccaggctagagttcagtggcacaatcatagctcactgcaacgttgacctcccaggctgaagcgatcctcctgcctcagccccccaagtagctgggaccacaggcatgtgccaaaatactcaactaattgtttattttttgtagacatggtgtctccctatgttgcctaagctggtcttgaactcctacactcaagcaatcctcccgcctcagcttcctaaagtgctgggattagaggcatgagccaccagacatgacctgtgtttatattgttaaatcaccattgtcaatcttgaaaggagactttgttttgatgtatgtaagattgagtttttactcatctctacatagtttcctcagattgcttttttttttttttgagaccgagtctagctctgtcacccaggctggagtgcagtggcacaatctttgctcactgcaacctctgcctcccatgtttcagtgattctcttgcttcagattcccgtgtacaggcatgccaccacacctggctaatttttgtatttttagtagagatggcattttgccatgttggccaggctggtcttgaactcccgacctcaggtgatccactcgtctaagactcccaaagtgctcggattacagatgtgagccactgcacccagcattccttagatttccaataaaaataaaaagctgtgtgggaagtcagaacttggttgcttcatgtcatatttcctatttttaagatttacagatattaacgactccttgggaaaactggacttcagtcgcctctctccaacaaaaaacgactattgggcgatgctggcttataacaggtccaagctctgcaacatcctcttctccaacgagctgcaccgtcgcctctccccacgcggggtcacgtcgaacgcagtgcatcctggaaatatgatgtactccaacattcatcgcagctggtgggtgtacacactgctgtttaccttggcgaggcctttcaccaagtccatggtaagagaacagcttctggcgccgcaaacaccttgggtcctagagaaacctgcacacttgtgtctccacctttttacctcttgcgggcatgagtctggtctcagtaataacattgtccagcccatcataaagggctcttgaacacattttcatcaactttaggttaagtctgtttgggtaaatgcgtcttggagggctgggtagaagatgtgggtttcagtatcatgttaagtatggctgaaagtccttatggaaatggtgatttttttgtttgtttggttttgttttttttggggttttttattcagaaactttgaaaatctattttgttgaatggagcacttgaaaactgctgttttgtgtcagtaggtaaacaacaaacattggtgactactgaattttcagcagatgtgattcctttgtttcacagaaaaactgtatcttttgttctaaatttttttcttctaatgggtataatcctctgttggagagtcctttgatagctaggagtgtgttttcttctttactttcccaaagacaattttggatgaatcatggtactgtggttacatttggaagtgtttacaaaggtgataagatgtttttatagtttggtgttcatttatcgaccatattaagaaccttcttctatgaaatggttttagtaggaagtattttgaatgaagaaagcgtattttccacaatatatttggtagattatttttcaaaaccaaaggacttcaaaaatgtcttcctattagtggacaccagtattccagttacccaaacttaaaatctacttgacagaaatcacccttttcccaaacacatttgccttttagcgatatcacaggccttcacagttggacctaggatattaataaaacaaagcaaaacaacaacaaaagaagaactattgcaggcctattatcctccagctgatctcacgaccttggaaactgtctgctgccttctcttacactcattcccacctgccacccttaaccttcgtatttggggatgacttttttttttttttttttttttttttttttgagacggagtctcgctctgtcgcccaggctggagtgcagtggcgggatctcggctcactgcaagctccgcctcccgggttcacgccattctcctgcctcagcctcccaagtagctgggactacaggcgcccaccactatgcccggctaattttttgtatttttagtagagacggggtttcaccgttttagccgggatggtctcaatctcctgacctcgtgatccgcccgcctcggcctcccaaagtgctgggattacaggcgtgagccaccgcgcccggcctggggatgacttttaaaaccacatcaaaagtcttttgaagtgcttaggaggaggtaagtaagtatatcttttattctaatcacccaagtggtttttaggcagagtaaacagacatattccaagagtcgaatacttaggatcagtggcagtgaagtgaaaggacctacggagaatggtgttccatgccgcagggtgggattgatctctaggaagtaaatgaatgaaacttacctgtaggtggatcacagggttttgaaatctccccatcactttgctcccgatgactgcataagcgcagcctcttcatgaaagtttctttgaccatggttatgcctcatactttgttgtgtccttcagtttacatgaaaagaaggaatatggatctgaactgggtgccagtgccatttaaatgaggcatttaggaatggggagaggagagaggtggattcttccttattttctgctggcccagtgccttccgctttaacaagcccagtcaaccatcatttgtaatctttgggtcttgagtcatctcacttgtatttgatcattgatgtgttttaaggagctcggttcagtggcatcagagagttcgttttctccttcttccataaggtccctaatcagaggaacgggatgggaaagctttagagatgagtctgtgactatggaatttggtgaggggtgatataaccatcctgccatttgttgtagactcgaatggatgaggagtcattgatagaaaatagtggaaactgttattctgtggcctgatcccattgcttagggactctgtgccagggcatgtgggaaaagaaggaaggcaagttctgctaaaatataaagtcagggtaaacatttttatttattggagaagagttgattattatctaatatttaatataatatgcttaataaagtcagacttgaaagttggctggttggacctaacgggagtatctctaaaaaataccagcaaattaagttggatcggtgactgtatcatgatatcggagtgttagctgttttgggagtacgtgtgctcaggacttgggctgagtggaaaaccagagtatggggttagaaatggaggcagagggactaccatgtcggggaggatgcacaatgaattggacgaaggttgcaactcagtgagcaccgtacctgtagtgtgtcttagtaatagcagatgcccaacctccatgcctaactcctttgcctaccccaccagtgtgcagcagcctctgccgcaccctactgcagtctctcctatttccctggcaggagagctcagagactacttgtgaacaggcctcaatgcctatagcaaggcaaggcttgggagaaacaaatgtcctctgggagcagccttgggtaaaagattaactgcgcactgagctttagatccctgagtgagaaagctgtgggaaaatgagtgtgtagctcatgagagggtttggagaaaagtggtgacatcgcaaaaatcccaggttttgttgaagttgtctgtggaggggcactcatagaaagggcactggacgtgagcatttcccttgtagttgagatgggatttgacatgacttcctggtggtggcaagacaagaaagtggcaacctgggacagtggacctcacagctctcctgctaatggtgctgatggctaagctcagctcttacccttgaccactggaacaacttagacatgtcaccagctttctgagcctgtctcattacgatgaaaattgtgatacaggttagtgtaaggaccgacaataatgcatataacatcaataatgatggatatagaatttctgcagttattataatctggctctccagtatggtagtcgtgggccacatgtggctattgagttctaaaaatgtggctaatagaactgaggaagtgaattttcaatttgattccatgtttgttaattcgaactgaaaaacaccacgtgtgccaagtggctgccatactggagagcgtggtcaaatgacatgcctagctcagtgcctttcgcatgggaggtatgcagtacttcctgccacgatggctgttactcttgtcgttgtgagcagtgccttggtcccgatgatgattctccaaaatgtaatctctgctgacagaacaagagtctgcaaattgggagtctggaaagggaagagaagggctttgtccctggccccaaagactcagggagaggtttactggccaggtagaaagggcgtccaggtgaagggaccctggttcagtgatctccaacctgcacgtctcatttgtgaggaagccgtagggtgtggacttttcttgtttctgaccttgagtgattagaaaatagcagcttttatatgtcacaaatggactttagataagcatgaagatgacgaagactgtggaatatgtagctaagagtcttactaaaatcctctctagtgtatttatatatttaagcgtttggtagtacttttttagccatcagcgttctctatattaggttgatacagaagttattgaggtttttgccattgaaagtaatacgtcacttcatgcagaggtggaattggcgctctgagcttgcttgtcaaattcacaggcattcacttttctttcataaacatttaggactctgtatttaggagaggaatcactgtgaatgtagacctcgggttggtcattttcctagtaagatagaccagactgactggaaaagtcaccctcttgggctatcctgcgtatgtggctcggcattgcttccgtcaggataatgcatcagtttcttggacaaagggtgcatttctgctatttgaatgcagacatatttttggatataagccacgcagttgcatcccatttcttccgtaggtaaaggctgggtttctaattgtgattgagaagcttagcatagatgcaatgtccctatcaccagatggctagtgtgctctgccttgtctgccttttaccttagagagggtgcttccttctgacacgggtattgctggagtacacattctgttgcatgaggtcaggggagcaagaaatacaacccagacttgcgctcggaagccctgccttcatttcttctctgtagctggctcccttaagtattaaacagcagtattctaatatcaacgtcccttttttatttgctgtgacttgctgtgactacggtgattttagttacagtaattaggtcactcttcatggagtcgggctattttaagtgcctctttaaggaatattgttgcagatcagtaattttacaattggatgttcttgtgcaactttattaaatgtgatctgtcttttaaatgttgcccttttacagttacacatttctaattgttgctgtaaatgcattatcactttgaaattaattaatttttccattttggctgcctgcaatataataatcactaatgagaaactcacaggaatcaattctcagcacagcggcccctactggtaaagccatgtctctgcctccctcttcttcttcagatccagagaactggacaagtgtattggggcgtcctgggagggaagtgtttgtttcttcctcccttcaatttatggtgaaataaaaatcacagataaacttggaaagtgagttatttttaagtgtcgttctaaaaaagatgcaatatacttcaaatagctgcttctaaaatatgttaaaggaaactaacatttgctgagtactttctaataatgaagtcacatcatacgtgcattacatgtttattttcttgactctagagcattcttttatgcagttaaattactctaaaatgttttgcacctgcacgcattaatgtgtattgtttggtaagaactttcgagttggtgaaaaaatgtattgtattttagtatctatatttatatatacatattagtctatgggttttaattcacaaaaccaggtgttgtatctggtgcacataagggattttcaaggctaatcttgggtttttgcagttgtaaccatgtgtgatgactttagaatcctaccacacttccaaatagagatgcagattgaccattttcccagataccacgatgctttatgtatcagcatatattttcattaatttctcataatttctgttagaattaataattccaagttctacaatcttagaattattatctttattttgtaattgaaaagcacagaaacctcatgcagcgtgttcaagaaaatgatataccagccttgtaaactttcacttgctaattgcagctgcatttgctttgtccaatgcacggtaatgcccctggcatccatatctagttatgcagttatgcttcctttttaaaatgtttgacagcaccttcactgaaatgaatgctgccaccaccgccaaccccaccttttttttttccacataagctttcatttctggtaaatacatccttgccagagttcccaggtccaagccggtcctttgtggaccagtatgcagatttgaagttgagcactgtcacttgcctcttaggagtgttttgtgcaaccacatatttgtgttggcagataacagtagaaagaatatcatgtgttagggtagcaagagcttagcagatgttttagggaactgcattttcaaatcattttacattaaaaaatggcttacgtttatggaacttctgcgacgatcgggttacgtttcctgtgcccgtgtaaagccagtcatcgtgctgagttttaacggatgtgcagctaccctgctaatggatgggccggcaatgctggtcctgttgcaaagttataaattataactagaaaaagcacaagatgtcattcttctaaccttcgtgaaagccaaacggggtaattctgcccttgaataacccgctgcagggtgatttatagttgtacaatttaaaacgtaatgaaggagataatagatgttgatttgttcctgaaattagtattttagaaaaatacttctccccctttccatctttaaatacctgcagctgactacactatagatactatcaagggcaaagccccctgtttgaatgtgtattggtacattggtgtatcacatacaaggcagagggtgtataaaacaggctttctgttgcgagggggaaatatggttttcaaagtggaaatttcattgtattcttcatgaatctaaacattttgagactcctgagtgaggtttgaattttctggttgcctttctcttgccagtccagatatgttagaaaactggactctcaggacccctctgtggttggaccacactggcgctttcctgcagttgtctgtcaacagaaggacctggtagctggcttgtcctcttacaccactgaggccaccttcttgcaggaagaaacatacttcttcctgccctggattaacattaccattggttttagtagtcttacgtcattatgtccaaagcttttaagtttacagtgcttgcttagtccagtgaccaatggatgtaagtaagttggaaaagggcaaaggatttagaatcatgagggttgtattcaaactgcagcctctactcccttttagttacataattttgaaatcatttgacatttctgaggttaattttctacatcagtttagctgctttaggccgcaagttattaacacccacttaaaggtggctgaaataatagaggttttgcttcccatgtatccagagttgctgaggcagcaagggttgtgtttggctactatatgagtagctcctttgtgataatctttacttttccctcatgcttacaagatggcttctgtggtgccagccattgcatcctatttgataaggtctgaaggcacagatgggagggatgaggctcctcattgcatgcctttttcctttatcaagagacagagcattctgcttcagaactgtcctcctgagttgacttcccgtcagatcccactggttgggactgagtcatctgtttgtatcctagttataaaggagactagaaaagtgcataactggctttttgagcctctagagtggcaggcgaactctgattttgaggaaaaaggatagggtaatggtgttgacacaggcactgttgaatacgtatgtacatattttaatagttttctcattaatcaaatggaaatgctatcgattttataggatcgttgtgagaagaagtgagaattgaaatgaaaggcatctagtcttccccggtccccatccacttgacccaccatacctcaagccacttctggctccatgctctttctttccttagggttttgaaacatgttcttcagcctagaatactcctcctccactcttaatttctacccatcctgcaaaactcagtctgaacagcacacgtcaaggaagcagttttggtctctcagattatatgaagctctccaatatgttctttcagaacagccagtgcctagaatactgcctgactcgtagtagcactccttatgtgttgaatgagtaaatgaagagtccctggaatttcttcttcataacattgaacacaactgcagtttgaaaacataatttctgtagttttttttttttctttttttttgagacggagtgtctctccgttgcccggattggagtgtagtggcacaatcccggctcactgcaacctccgcgcctccccagttcaagcaattctcctgcctcagcctcccaagtagctgggattacaagcactggccaccaaacccagctaatttatatatttttagtagaagcggggtttcaacatgttggccaggctggtctcaaactcctgacctcaggtgatccacctgccttggccttccaaagtgtggtgggattccaggcatgagccactgtgcctggcctgtagtttctttttcttttttcttttcttttcttttttttgagatgaagtcttgctctgtcacctaggctggaatgcagtggtgcaatcttggctcactgcagcctccgcctcccaggttcaagcgattctcctgtgtcagcctcctgagtagctgagattacaggtgtgcaccaccacgcacggctgatgtttgtatttttagtagagacgggatttcaacatgttggccaagctcgtctcaaacctgcctcagcctcccaaagtgctgggattacagatgtgagccactgcacccagcctgtagtttcttatttaatgtctgtccccccttctcttgacagtggtgtttttgccttcacactactgtatccctggtccataccgtaaatgttctgtaaatgtttgtaaatgaatacatgaaagatgaccaggtgctgaatcagtgagagtccttaatgtacttcttatcatttatccctctgaggtaggcaagggattatagtttagaatgtgtaaatacgtaaaagataaggcaaggagacctgctgagagtcacacagcaagcccccaaggtcccccaggctcatggtcaaatgacatgtaagggacgtatccagcggtgtgggtatgtttggagggaatgaatgtaaggagagagaggtgaggcacaggagagacaggatgagctttagaggtagacagctctcgggtccagccctagctctctcccattctaactcttgggcaaggttcaaaacctgattaagattcatgcataaaactgagatgttagaactacctcatgggcttgtcttgagaattaaagacgttatgaacttaaggcctctacagtgtgctagatgcttaagaaatgttaactactattgttattggcttgcagtagaaattaaagattatgaatgttcagcattcagaatatactagatactcaataaccattattgctgtcattattaacattattttccccagctttactgaggtatgagtgacaaaaatttcatatatgcgcatgagtgtgtgtgtgtgtgtgtgtgtgtgtgtgtggctgggcatggtggctcttgcctataatcctaacagttgaggaggccaagctgggaggatgacttgagcctgggagttggaggctgcagtgagctatgatggtgcccctgcactccatcctgggtgacatagtgagaccctatctctaaaggaaaaaaaaaattatatgtattcgtggtgtgaaatgtgatgttttgatattcatatgcattgtgaaatgactaccacaatcaagctaattaacacatcggtcaacttacatagctatcattttttgtgtgtggcaagaacattgaaagtctagtctcagcaattttcaagtatataatacgttattattattactatcgttaactgtattcaccatgctgtacaatagatctccagaatgtattcattctgtctaactgaaacttaggatcctttgaccactatctccccatttatcaccccctcccacttccccactaccagcccctcctgggaactgccctctactctctgcttctgtgagtttgactgctttaaattccacacaaaaagtgagatcatagagtatttgtctttctgcgcctggcttattttacgataaattgattgcttctcttcccattgtttatagatacccattctcgtaatgatggcactgtgtctgtcatagaaggcctaattctccctgttaacattgaacataaaaacctcatatgggccaggcacagtggctcatacctgaaatcccagcactttgggaggctgaggcggatgaatcacctgaggttgggagttcgagaccagcctggtcaacattgcgaaattctgtctctactaaaaagatacaaaaaaattggctggctggtcatggtggctcatgcctgtaatcccagcactttgggaggccgagccgggcgaatcacgaggtcaggagattgagaccatcctagctaacatggtgaaaccctgtctctaccaaaaatacaaaaaaattagccaggcgtggtggtggggcgcggtcgtgggtgcctgtagtcccagctactcaggaggctaaggcaggagaatggcgtgaacccgggaggtggaggttgcagtgagccaagatcgcaccactgcactccagcctgcgtgacagagcgagactccatctcaaaaaaaaaaaaaaaaaaaaaaggctgtgtgtggtgactcgtgtctattgtcccagctacttgggaggctgagacatgaaaatcacatgaacctgggaggtggaggttgcagtgagctgacatcgcatcactgcactccagcctgggtgacagagtgagactgaaaaacaaaaaaacaaaaaaaaacccaaaactatatgtgcaagcctcaggaaccactaagacagattacacaatgctcatcagaactcagcaggcttccacagtgcagattttaagccctccagttgcctgttttactggcaccaagaacacaccttagcttggaggaaacattggccactttcttgttaaaaacaaagagagggaaactagatctgcctttgtgaggctggagcacctcatcaatgtattttttctgccttgctttatagtgttttaaatccgcctcggcctttgttcctgaatgagcacccgagaaggggagaaagtgactatctggccttagtatgtgtaacaaattatttaatgaacatttaaccaagatttgcaattcccctagttttatcttcccggtttccttttcttctgtgtgcccgttggcattttggtaatgtgctgcctctttataactctttgtagctcttttattacttttcttttttcttttaagtttgtggtgccttctttgatcctcccctctttcagtttccttttctccaatttcatacttatttccagtgatttttggctgcaacgcagtttagatattggaggccagcgtgattaaaccgaggccaagagtttgtattgccccatgacgatgtttctggaatgtttcttctgtgaacagtgatttttgtataactcactggacatgttgatttttccctgtgaggtgtaaggtaatgttttcctagcaaaaacaaagagggctgaaacctggtgctcagaatcgtttggaaacggaactcctctccctcttctttttacaccaagataaagaaatactttgcaaatcagctgagcacatgttcccagctccgtgccgggctctgtggtcatgggtttccttctttatgtcttactcatctaatgtaattttagagtgtgttctctttagataattgtgtgtctctgagcaaatcacttatcctctctggtcctcagttttcttatctgtaaaatgaatcagttaaccaagaatagccatcccttgggttaatagaacagtttaacttgaaaggaaataaaaaaaggagactaacatgggcccacagacattgtatttcataaattttggatgaaaactgaacctaccatcatttattaagagaatggatattttcatgtcagaaattataggaaggatacagttatgggatgaggagcaattcttttttttttttttttgaggtggagtctcactctgtcaccaggctagagtgcagtggggcgatctcggctcactgcaaacctctgcctcccgggttcaagcaattctcctgcctcagactcccgagtagctaggactacaggcgcgtgccaccacacccggctaattttttgtattcttagtagagacgaggtttcacggtgttagccaggatggtctcgatctcctgacctcatgatccacccgcctcggcctcccaaagtgctggaattacaggcgtgagccaccgcacccggcctatgaggagcagttctttcaatggaatatatttgacttcagggagaactcactcaaatgctgctgttactgtttttccctttgttggaagtgatggggttgtacttggaatgactggcctagaaaaccctacaggtaccatttaagctccatagttcttctgtgtgtgtttcggatcccaggttccaaacctgcactaaaacttgttgctgcatctcacctaatcgtgtagtgagccaggtgagctcatctgtgaaatgcagacctttctggacgtaccacctcgtggggtgaagggaaagaaatgatacaggtgtacatcagggtataagctgtcctagagtctggattctttttatccagaagccattctttcagcctgtgcctttttgtaaataccataccccatctatttccacaaaggatttggggcattagcgagtaaagggggaatatgttctagaagaagggcgctcacctcagtaaattgatgggtgggccacaaaaatcatgtcacaagatcttgttgatgtgcatgcattcattcattcaacaaatattattgagcatctaacataagccgggtgctttgctagggacagaatgctgtacaaggtccctgtcctcatggggaccgtatgttgggaagacagatgataggcatggaaatgaagagacaaaccactccgacttcagcccaggaaggagctttaatttgagtaattgttttcactaattcatcttcacagaaagaaataatatgatcaccttcggttagtaaacaaaacaaataggcaaacaggtttacaggctgaggtgggctggatcacttgaggccgggagtttgaaaccagcctagctaacacggtgaaacccttctctactaaaaatacaaaaatattatctgggtgtggtggagctttcctgtagtcccagctactctagaggctgaagcatgagaatcacttgaacccaggaggtggaggttgccatgagcagagatcgtgccactgtactccagcctgggtgatggagcaaggctctgtcttggggcggggggcagggcaggggaggggggaaagaagagaaacagctttacttacgtttttgatgagcctagcctttgctgtgctttggaaaatgggctgtggaatttggctgaaatagtcaaatgcgtagctggctgtatgtggactgataactgggcttattttgcttcttttagatctggaaagactaagcgcaaaatagaaatgctaatggtattgatgtgtttttcttcctttggtgtgataaaaaggtatcagtagggatcattcataaaactagttagtaaactatcagtttaatgtacaatggtgaagaaatacatacatcatacttgagaccatgttccagagagtattttgtaacctgtgacgctcttttcaagtcttagagaggaagtatggaaagagcatgcgcttttgactgaggaggtcttgggtttaaaggtcgaattttgccacttactttctccatggccttggtcaacatcctgaagtctcaggtccttgtctgcctttgctttgacacgagatgttgcctgcctcaggcggttgttgcaaggactaaaatcaggaaggcctggaaagacttggaagcatttctgtcacatcccaggaactccgtaaatgccagcaagtgttagattattgtgatgattttactactcctattattgatattataattaatattataattgttcattattaccttataaaaattacttatgatatgtttttcttactatttggtgaacatcgagtatagtaccaagtgtatacttttttttttttttttttttttttgaggtggaatctcctgtctcccaggctggaatgcagtggcattttctcggctcactgcagcctccgcctcccaagttcaagccattctccagtctcagcctcctcagtggctgggattacaggcatgtgctactacccccggcaaacttttatatttttagtagagacagagttttgccatgttcaccaggctggacatgaacttctgacctcaagggatccacctaccttggcctcccaaagtgctgggatgacaggtgtgagccactgccaattatatacttattttaggtgtattatgctgtgccctgtgcttttctttgttatactggaaggtcatgatggcaggatgtcttatttatgcttctctgtactctgtcctgtccagtgcctttcagaagtaaggtttttagaaaggtttgagttatttcctgttttctgaaccagacaggcagagtatttgatcttacaaaaatctggctcagttcaagttagctgtgtagctttggaacggaccctggacagatggattttctaaaattacagaggaaactagatctgtaactctgtacatttactcctgtgccagtaacaatggcaatattttaatactgtaataaattttttcttatgcatttgctataaattagtaaatctgtgtaaagctgcttattgcatcatcatgtagaatttctacatcctgcagaagtttaagaaaattgtcttccttttacagacaaggacactgaagtttagaagtgctaagtaaactgtcttagatcacttagctagcaagtgacagggatggaattgaatctgtatttatcagaggtgaaagtatatgtgtaattattcaactacacttaggtaaatatccgcatacatgcatgcctccccttagactccattgttccaaaaggtaatgacaacaaaaattagtcggaggcggaaggaaatgcaaaagtggacatttactcgagaaagaataaagaaaccatgcaggattccatttcacaaacctctacagctgttgctggggagtcagtggaggggtactggaggaaggcagactttgttctaagctacttagcagccaaggaaagcagaagaaactattattattatttattattattatgtgagttggagtctccttgtgtcatccaggctgaagtgcagtggcatagtctctgctttctacaacgtccacctcctgggtttaatcgatcctcctgcctcagcctcccaagtagctgggattacaggcacccaccactacatccagctgacttttgtatttttagtggagacagggtttcaccatactggcccagctggtcttgaactcctgacctcaagtgatctgcctgcctcagcctcccgatgtgttgggattacaggtgtgaaccactgcttctggcctagaaactattattaatagaagttctgggacaacggccctgctctcattacttgcccccaatccatgcaatgaaatactggcctgtgagtatgtggtcccttcagctcattttctgaagctgaccaaaggagcacagtaatgcataacgggggagtaaaattcctcaagacgagcaaaaaaggcagaaattaataaaactctatgtattagttatctatcactgcataacaagttacctcaatatttagcaggttaatacaatgcacattcattattttatagcctttgtagattaggaaccagccattgcttagctggaccatctgctttagagtctcacaggctgcattcaaggtgtccactgggctggggtcaacttcttaccgacaaagctggtgccccaaaagaatggggtcttatcctgttgggtgtcatgaagccaacacacaaaaccgaaagtagtgtcaagcagtacaggctttattcaatggccatggaattgagaagcaggagcatggctcacaaattcacaaatcagcttctccactaatgaggggtgaggaagttaaaatatagactttgttgttgttgctgttttaatgaagaggctggacattaaaatcaaggggaggaataatcatgtcttctcttgaaatgggcagtgaacttcccggaaccagagtgttgccttcctttttatccttttatggctgcttctgatcattgtcatggtgattgtcaactgtcttggcgctggtgagggggctgtttagcatggaaataggattataatgacacctgaggtctttttgaagtccttgggtcggctatcttgcttctaacaaatctcagctggtctggttacagagggaactttttatcacaggtgtcctgtttcttaaagataagcagtgttattacagggtagaaattcacctatgtcaagtaggcattataccaggtaacaatctcaagactcagcagggaaggatccacttgcaagcccacgtgcttgctggtaggactcagttccttatggcccagtggattgaaggcttcctttcctgcctggtgtttggttccttgccacgtagggatctccatcatggctgctggctttatcgaagcatgtaagccaagaaggaaatagaatccattggtaaaatgaaagtcacagttctttgtaatgtaaccacggaagtgacgtcttactgcttttgccatattctttttgttagaaggaaatcactgagtctgatcgttgttaaaggggaaaggatttcacagtggtatgaatcctgagaggcaggggtgatcagggccagctaccacactctacaacttgaattttgttttagatttcagtgccttttggggaccctgctacattgtggtagatttactcacaggacttgatgatttttcttgacctgcctgaagccatagcatttattacggataagtttgtcttttcttcgttctttttctgtttgcatcctttcgtcatccttttcttccctctttctggactgagagaggcaccaaatgcacccatttaaaacatatatgcatttctgctttctgatgggaggtaagatttagtcatttaataagaaagcttatgaaaagaataaacaaactggtagataatgtatcctaaagtcaagtatttgctttcatgttgctttagtagaaggggcccttgttaatcgatggcccaaattgtctttctcaagaaatgtgtattgcagaatttggatttgagttacaaaaactagccagaaagcgtgaactttttttttttttaagccataaagcttggtaaggctagccaatcatttcaaagcctgtgtagaatatctagactatatgtaatcctaggatttgttgttgttttgttatgattttttttaagcaggaagctaaaaaaaataaccacccgttactttgctgcttttagaaaataggtttgagattgattttgaatactaaagtatagttttcatgttataaagccaaccatgttaaaaatgtataataaagtatctaatttagcaaaattcaaatttcccctatgaaatatcaagctctttttatgcttcttcacatggcaccttgtgtagaatttgaaccactttaaacattgcatccttgagttgcatatgatgggatctcttgaatcatttacattttgaaaaaagaaagtgaaatattctttaagaagccaaagtaatccacgagaatgtatggtgtttgttcagctggatatcttatttatttgaagtactgagagagaaatcttttctgactgctcaaaacagggaataataaacagtcagagtgtccaagtaatctgagctagaaagttccttctttcagagaaaagttataaaaagtatatttgccggatccaaaaaaaatactgtgtatcaactactgagacctgcataatgttttcttagtattctcactctttaaaagaaaaaagaaaacctgtaaaatttgggaacttaaactttttttgatattttaatatttctaggcaggtgagtgcaataagtctgttttttgatcttagaacataacatttcttgttggctattgtgtgtgctatgtgtatgatttgtctctttgttaattctctataaatataaaagagcaagtaatgaaattaccatggctgaattctgaatattaacccagagcagatttcctctaagaaagatcataagaagatgcttaaaagaaaacattatatttcaaaagaattaggttctgaaatatacccaataatgaaaacaatacaattttcttctgctttttgtccttcctgttccaagcactgggaaggagctggcatatttcttatgtatgaaaagtagaataatatattggattcctttatccctaacccggaagagtctttcttggactgtggtttgctttcccgttatacttaagcttgtttattgcatcttccgatgtcacattatctcattgccaagctaaaggctctgttgggttcttagttgaacccagagtggaggccgatttcatccaaagccattttttttaaaattagaaattaaactcacctttggcaagtcctcctgaccagggatgggtcctcatgttagtctgtaatgtgaagatatgaaatgtatttgatacaataggagattcactgtgattttcactgaatgagtatacattctgcagaactagaagataaagataataaaacaattcacatttcttaggactaatttattttccacagtccactaccaacatggtgggatggggaggagctgagaagagcatatttggctgagtttggttgcagaaggatgcaatgtgaggtagcagaaggggctgtaagaacacaggattttgaagttgaagaaaccagcctggaatgaatcccagcccttccttttagtgacctgctggccagccacattacctccttgggctttggattttctttttcactgtaaaatggggaaagtagctcccacatctttgggctgttggtgggaggtgtgcaggacacagctgaaacctttggtgtatagtggatactaaagcaatgctagtcttcttcgtgtgctaccagttagaatgaattttgctgacatcttactggtttctgagggtatacagacacttattgtcaaagatattattgattatctgatccccaaacatatggagttacatcacagcaggtgagaaatacccttcaactcttgattctaaggaaaatccttggggagccgccatcattccttccacgaaggaatgaaattataacgtaatgtattgttggagcccttagttcaacactgtcttttttcaggtcatattaatgcaatggttagcatatcaacttccttctgtttttagtgactctaatacattatattcaccttgttctctgcatgttctttctttaagtcatgttagatcccttttttggaagcaggtcaaatttgaattaataaaatgatttatgttgaagtacaggcatatcccacagaatctcttaataccaggccaaaagtaactttatcttgatctgtagttcggacatatttcttggattgtccgcactcataaaaagagattgcgtaacaccctttgaacaaatggatatttgagaaccatcctgtcttcagatttagattttttcaatttttttttactgtcatatgattcacatgctagttactgattgctatcatgcagtctgccagcagaccagatggcagatcttttaattagatatgtttgtgtgtgtatgcatgtgtgtgtacatgtaatcacagttcatcaaggacctaataaatacttttttctctctctctctttttttttttttttttttgagacggagtcttattctgttgcccaggctggagtgcagtggcggatcttggctcattgcaacctctgactcccaggttcaagggactctcttgcctcagcctcccgagtagctgggactgtaggcatgcactaccacacctggctaattattatgtttttaatagagactaggttttaccatgttggccaggctggtatcgaattcctgacctccatgtgatcggcctgccttggcctcccgaagtgctgggattacaggcatgaaccactgtgcctagccttaataaatacgtatttatgtctttcgatctttttctgtttttctacattccgtttcccctatggctgctattgttttccagtgagctatttatatatatatatacatatttttgagagggaatcttactctgttgcccaggctaaagtaccatgtcaagattatggctcactgcagcctcatgagcctcaaccttcttggcctaagtgatcctcctctctcagcctcccgagtagctgggattacaggcacctgccttcatgcctggataattttttgtatttttgtgaagacgggtttcatcatgttggccaggctgcagctatttatatcttatatgtgtatttgtaaaaaatttattcctcagccctgtgtggtagctcacttctgtaatcctagcactttgggaggctgaggtgggaggattacctaaggtcaggagtttgataatagcctggccaatatggtgagaccctgtctgtactaaaagtacagaaattagttgggcatggtagcggtgcctgtaatcccagctgcttgggaggctgaggcaggaaaatcgtttgaacccgagaggtggaggtggcagtgagtggagatcacgccacagcacttcagcctgggcgcatgagcgagactatgtctcaaaaaaaaaaaaaaaatttcttattcagttgatttaagatggtttataaagacaacatgagctagcggtagaaatgcgaatggacgcttgtagacagtaaggactcaatacgtgggtttgttcaagttatattgtgcagacaggcatatgcagttagaaaatctgtctagggtagggagagataaaaccagctacttcagccctgctatttttatcctgaagattttttttttactctgtttatgaataaaacattttaatcagtgctgtatcaacactgatcaatttttttcatggaagtgtaatacagggtgaattccattaagtcaattaaatacttagatccagtttttaaacagtgcgaagatagttaagctcttcttttattgaaagcctttttaccaaaaccatttttttttattttatagtgaagatttcatgtatctgttttctgtacatgccaagttttacagctttttgtatcatgagttttcttttgcatcaattatttctaccaagtccaacttgtagattgggcagatctggatttcaccacacctggtttttgttgtcattgagtttttgtgatggggtgatttcagtgagaaatatatgccattaatttgatgaaaaatcagtatttatttattaactaatacccaagaaattccccagcaagcctcttccagtattctagagtttctcgtttcttgaggattggtctccgggcatactcctaatctaattgtttcccaaactttcaatgttttggatgactttggaagccttgatttctgtaggctgtagcaggacaaattctgatggacagatcaagatgttctatgttgctctaaaacagcatctctcaaacttttttggaccactatctaagttttttctgttaaaacccaatacatttatacttatgtatattcgtgtgtgtgtgtgtgtgtgtgtgtattatatgcatgtgtgtgtatttgtctgaaataaaagttttacaaaatgatacttttatctgagcagtgtcctgctgttttttttcccctaggttgtgtttttgtgtttttgtttgtttgtttgtttctttgtttgtttttgagacagaatttcacttttgttgcccaggctgcagtgcaatggcacgatctctgctgaccccaagctccgcttcccaggatcaagcgattctcctgcctcagcctcttgagtagctgggattacaggcatgcgccaccatacctggggaatttttttttgtatttttagcaaggttgttgatcaggctggtctcgaactctcaacgtcaggtgatccatcctcctcagcctcccaaagtgctgggattgcaggcttgagccaccgtgcccacctgtgttttttgttttgtttttgtgtatgtgccaatgatgacccagtttcaataccaactgttgctttcaccacccactattggtttcaccaccccgctagatcacagtctgttctttggcagtcactgccccaatactgtttgatgtgctcccctctgataaatgttcattgagtgccccacatgtcaggtactgacttaaggcatagcaaatgcaaaaatgagcaaggtgttctcttggctctatgggtgcctaccttagaaggatggagatgggaagaatgtgaaagggaggtgagatgagcagcactgggatgtgtggcttttctgtcttgaggatagatagaagaggagtcagataaagttgcagaacagagatgacgtctttactgagacttgaatgatgtgtcggaggcaaacatgttgacacaaacgagagaattttaggttctctttgtagctgtggctgggctgggacaaggacgatggacaaagttatgggggtgctaaaaacctcagtaatgaagataaatgatattctaatctaatattttaaaaaatcgaggctaggtgtggtggctcatgcctgtgattccagcattttgggaggccaaggtggacggatcaccagagttcaggagtttgagaccagcctggccaaaatggtgaaatgccatctctactaaaaacacaaaaattagctgggtgtgtggtagtgtgtgcctgtagtcccagctactctggatgctgaggcacgagaattgcttgaacctgggagtaggaggctgcagtaagctgagatcatgccactgcactccagcctgggttaacagagcaagactctgtctcaaaaaaaaaaaaaaaaaaaaaaaaaaatcaaaattgatgcaaaaaatatgataacatttcaaaatttaaatcaagacaaattcaatattatagcaaaggttcaagtaatgaacatgaatttgtaatgatgcctgggggaggtgaaggttaaaaaaaaaaaaaaggccaccaaggacctcatgttaaagttgatgatgacggaagtgagcagtgatgatgagatttaaaaaactaacttttatttttacattattttaactagtatttgtgttaacattattttaatctcctgtgcacttaagggagctggcataggccggcagtggctataggccaggacctgtgctatgtagcttatctatttctcatgctgattctacttttgttactaccgaaggagcttagagggaatcagtgacgtggacaaggctatgtaactaaagggggtggaggaggattcaagccccttgcaacggactgaagtgcccaagctctaaatccctgccacccacagcctctgttggccccaggttgtgtctgagattcagaggttgtttttatagcagcaacacagtaagttgggaagagggacacatttttaacatagacaccaaaagagaggctggaagagttgaccacttagaaatgtcacgagtgtctgtgaatagtgttgggggctgagaggcaagagaagaaaatagtcctaatgttgtacaagtagcaatggaaacaaacttgttaaaaaaaatttaattttgtttatgcatgtgtgcataaacaaagcaatagaaaatatttgatatttaagattgagcacttaacaaaatactttgtctctttttggtttgctgtcttaagcaatagccttaaattcttgtcccagggatacctgatagagctaatatagaacaatattttaacataatttgaagtatttttttcttctgatgggtatgtagttcatttttataaaaaaatttaaaaattctgaatctgtggtgtttctgaaacatcctgatatattttttgttgatgactcttaacaaaggatgtaagacagattctaagaagagaaaaggtagaatatccacatgtctcagtttcataatatgtgtaaaaattatcatgcccattcattatttaaagtgctgtggctttttagtgaataccaacattaacaaaccatgttaacatgatttaaaatatgtaatgaaatttgcaatgcatcagatgatggaactatcaaattagttcacgtggcgttggctgatcacccttatgaagagttacttgcattgtttgaagagggaagatgcacatccccttgtgggctggcagcatttttgctaacactgccttaaatgatgctactggcaggatggttaatttgatgttgaaatgtcacacaatatgtgcccaccctacgatttgaatcttctgtgccgttaagggaattggcagtgttcagacagaatggtaacattctctctgatcgtgtctgtgtctgcacccttttttgttttgtttctgttgtcttcattaatagacctttcaggaaccttcctgggatctcagataacagttcttctggaacaggattatccagaggtagcaaaagctctcctgcaaatattccattgcacgactttaaataaagcagcaagaagtcttttcattcagttcagatttgctacttgttctcttggttccttcaaagtaatgactaagtacaggtctttagatagagagctgcaccaaccaggtattgcttcgtgtcttccacgtacgtcctgagaaagcgaaggtgaatttcaccaattggtaggtggaaatagaaaaactgttgattctttttttcattcaccaatcttttttttccccaaatgctaagctttatttggggaaatcttaacagccgtttttataagactctgcatttacaacatttgtgggggctgcagaggacgcacatgaaaataacatgaactggccatgtacggtggctcatgcctgtaatcccagcactttgggaggccgaggcaggtggatcacctgaggtcaggagttcgagaccagcttggccaacatggtgaaacctcatctctactaaaaatacaaaaattatagctgggcgtggtggcgggcgcctgtagtcccagctacttgggaggctgaggcaggagaatggcctgatcccgggaggcggagctttcagtgagccaagatcgccctactgcactccagcctgagcgtgagactctgactcaaaaaaaaaaaaaaaaaaattagctgggcgtagtggcaggtgcctgtaatcacagctatccagaggctgaggcaccagaactgcctgaacctgggaggcggaggttgcagtgagccaagatggtgccactgcactccagcctgggtgacaaaaaaaaaactttacctgggcttagtaagttgcctgacttctcatcctggagttcgtatccccttgtttctagaagagaaatccctcagatgtgaaggtgtgttccatgattttgtcgaacttgccctacatactgttttattatatattctgcccacttctattccctgccaattaattaattgtttcattggtatagttttttttttttttttttttgatacagggtcttactgtgttattcaggctagagtacagtggcgtgatcacagctcactgcagtcttgacctcccaggctcaagcaatcctctggcctcagcctcccaagtagctgggactattggcaatgccaccatgttcggctaatgtttttaattttttatagagacaaggtttccctatgttgcccaggctggtctggaactcctgtgctcaagccatcctcccacctcagtctcacaaagtgctgggattacaggtacaagccaccatgtcaggccattggtataccattgtttttcttaaacatttatttattttcttatatttacagcatatgtggtcatttaaaattattttatagcatataaaagtaaaaagaatataaattaattttttagcattaatattagggaagataatctgacatttaaaaatacatgtctatatgtgtatacatacatagaagtatatatataaataccagtactagtgtctgctaataggtggcgccactttttatctgtgtgtgttgggggtggaattagcatgtagaggttggcaaaggggacaggagactgtgggatgattagtatattcttatttggcctgggagggaaaaaaaatctttcatttccaacaatattcattctctgtgtcacctcagcatttaatttacttccgtcacaaaactacttgaagttgtcccaggctagttggtcctattaattacaacctagagggattctattagtaaactaatggattacagtacctaaatggaagccagcagatgactttggaaggactgatccgcaagggccttctgtgtgaagattaaatgaagcttcctttagccttctcaggtggccacagtttcccataaccttagagattatctaggccaaggctattaatttagagattaagaagccaaacccagaaaggttgaaagactgtcgtaagttcacactgaaagagagtggtgtaatgcccttttcaccaggctccaagaaatttgcctattttatgttttaacggacatggtatccccagcatttttaataaatgcccttttcttgcataagtaactggatatttccgagtggcctacaagtggagcgtgatttcatctttcatcaagagaagcagcttttcctcctcttgtatccgttttcttccttttctaactatcaaggtcatgcggtatctgccattttgcatattcttgctttgcttcatgttttccttaaactctgtgcacatgaatatttgtggtatatggcttaattgtaagcgatcaggcatcaatggctttttatgaggcaaaatctactttctgcatttgcgtgtgccattattatagattgctgatgtttgccaatggatattcttggaagtcgtcttctggtttaaatgcagttaagtatttaaaaataataccagtgacatgtttgcatttacattcagcctgaaggcctacttgatgctgcaactgaaaaattgttagactagattttattttattttaattctttttgagacagggtcttagtctgtcacccaggctgctggagtgcagtggtgcaatcatggctcactgcagtcttgaccaccctggctcaggtgatcctcccacctcagcctcccgggtagttagggctacaggcacacgccagcacacccagctaattttttgtattatttatagagttgggtttttcaccatgttgttcaggctagtgttgaactcctgggctcaagcaatccgcccacctcggcctcccaaagtgctgggattacaggcatgagccactgtacctggactccactatgccttcccctccccttccctcccttccccaccctaaagagtctcgctcttttccccaggctggagtgcagtggcactatctgggctcactgcaacctgtgcctcccggattcaagagattcttgtgcctcagccttccaagtagctggttttgcaggcatgcaccaccacacccagctagtttttctatttttagtagaggcggagtttcaccaagttggccaggttgttctcaaactactgacctctcctcggccttgcaaagtgctgggattataggtaccccgcctggctgatactttccttagttgttttcagtgtaataacctgtcttcagtctactctttgtccttttctctcctttcctccctgaatactcaagcttccagtgcacagatttctccaaccctgaatgtgactgataccaacaccatactagctcttccacagatgcctgtttgttttgcagaacactggcctgaatgactcagacttggagcttgaaagagggagaactgatgtggcctgtggcagacgtgtccaatgacctgctgtgtccttgcttttgaagaactaaagagtagacttgaccactttttaaacatgacattcgatccacgtggcatagcaaggatgggatccacaagatggagtgatctttacgccatcctcctgaccataaatactaaatgaatactctatttcagttgagtttttagtttgctctgttacgtgaggacacatcacttgcacctcagtgtgagtttgaaagtgttttctctggagaataattctgaagaaataggccctccagatatcagtagtgacaggggtatcagtaatgttgattactaagttcttgccacaggtagaagccatgctactgcacaagtttcatacttgaagagtggacatctgacacagtgttggtggttgttgaagtgtatgactattactgtgttgctttggaagcttgatgccataacaaaagtgcagaattccatgtttgataactttctgacttgatgaaaatgaattgtggatacagatttcactatccatgaattgtggccttaactttctcatgtacttactttaaatcagagagcccacctgtccaattctagcttctcctgggcatcctgtatttgacacagcccctcccagcattctgagtcatcgtctgctgctcttgcactgtccgttttccaaatgaggaactcatcggtaaggccagaaaggaaagggagaaaaaacaaacaaacaaacaaacaaaaaataggaaaaaaagaaagagcgtatttatagatggtagagaattctgggcatgagaaacccagccaaacaagtggaatgtgtgcataggtgggactgctgatcttgttttatgaaagaaataaaggcaagtcaaacagatcctttcgcaaggatccccatgtgtgtatgtctaacccagtgacaggtaaggcagccaggagctgctgttatttcagtgcaaagctgttttcacaatcacagacatgcacagctcaaaaaccctcacaggtcacgcctgaataccttcaatgtgccccatgtaaaaatacactgcaagtcgattggacatgccctatgaattataccttatttatgatcgtcgagccctcccttttcccgtcatgctttagaattatgggctggagcagtttttaatactctatttattttaggggaggaaaatgtttttctttaaccacaacattcatgcaataccaactgctggcagtttccccagcatttaaggaaatattgttgtaagacttttatgttctgtacttcaatcagctagagccagcagtatcccaatggaaggaccctcaacagaccattttcagcattttgctacaattaaactcctctggttttagccctcaggcaatttagtacctttttacatatgcacattatgaacttttgaccagggtctagcagtcatatattagaatgctgctcttgaaggcaggcttaacaagttcctctgagtattacagttggagtcagttgtggaaaaggtaatttaagcaacttgcagcgaggccattcagaatctcagcgatgatcctaaatatctttctctcttgctcacgctcttttttttttttcttgtttcctctggaagctggtagcaggagctttcaaagtctgtgattgatcttttattcagtagctaacgagggctgtgattctattagcgcactacaaggcaagagaacagtgatttaatgaagtgtctagtgagccggccatagatttatcctgttgtcgctaatttgcagcgcacttgccagcataaaggaaactgcactcacactgctattaagcaggtatttccttagtaaattgttgtaaggtcaggtacagttatctgagcaaaagcaatgccttacctcttcagtgtctgcaaatgacagccgccgtgctgagcgctcactgaagtggaaccgggagatcagaggtccgtctccaagtcgcccttagcggaggcaggagcagatgaactgccaagtaggagtaatagagtcataattggtgattagaactggaaaggtgcaataacatcttaatacaaactggcgtatgttatagttactgtcagttgttgtaaactcgtcctgccgcctggactagttacgcttcccttgattagctctgagaaacgaggcagcgggcactggggcagccacatagacaacatctaaatttttgttgctttcctgggtcttgccctgtccttactgtttcccttgggcacgctgttcaccccttaggacatactacagtaaccttttcccaccaccgtgggaggactgtgattttgtaaatgtcctctgatctctcctctttgcaggcgcagtgacatttatgcacactggctttgaggctcattgatcttttgttttatttgcctttgctgaggcaggggcaggtctttgtttcatgtcagatccgtatcccactgcaattctgtgttactgtaggagatttggggttggcatgccagagtgaaaacgcgaaagaaaataaacaggcagcactgaggaattatacacttgagcttggcatttttcttaacgcagggctattttaggtgcactgcgcatgttggaggtgcccttgcaggtataggtaggcattgtccatccgtggtaaaaagcaatagaagaaattcttacccgatgcttaatgaattgccaggctggttaaaaaggataacccttgaaacctagggtgtccaactgctaatttatatagactggagatatttccatgcctcgcagcaaaatttttctttaaattcacagaagcagcagctatccagcattgtccagttgtgctgagtagctgtcattattgataaacatgtaactggtcatttgtattgttttgagtaggatatggcttatcaggatgcatagtagagaaaaatgagatgaggtaatgagatcacatacactgaagcatcttacgaatctggcacatagtaggttctcaataaatcttttttgattctgtgactgttagaatctgttggctgatactctgtcatctggctctcactctgctccataaaacttgggtaattctaatgcttacttcatcccagggctgatgtgtgttaggttagggtttatgatcaagtaaagagtttaaagaagtgttttatgagggagttttgtttgcaaatgatcacctggtaatttaagagggtgagctaaacttcctccttttctagtatggacctttggggctcaggatgaggatgttcaatttgtactgctggtggagctgcctttccattaagtgagtctttctccaagggaacagaagtcttaggttgttgatctggcggtcagaacctaggacaggcaaggcagtgggctgttgtagaggagatgaagctgatcagagcacacccacaccagtgacaaccggtcaggacctgggaagggctctgacccattcatctgagagatgtggcatgaggaacactgagacctaatgcttattgcttaatattgtggacaagggactctgtgggttgtctagtactaagcagaatggaagggaaggatggaaggaagagagggagagacggagggagatggaggatgacagggagatggagggaggcaaaaagaaaaagggagaaggaaagagaggaaagaggggaagggaggaaggaaagaagagagagaaggaggaagagagggaaggaggcacagaggtagagaggcagggagataatggagatcctggccaaaagttaatgctccgtttctagtagtccacagaaagcaccttgaccaagtgactgaatacaaatcgtatcacaaactactaggatttcttgggtgcttaccatgtgccatatttccttgaatcttcatgacgatccttcaagggatccttgttttctaaagggtaaaggtgcaggttagaggctatgtcagaagcaagtcaggatttgaaggcagatctgtctgcttttgcccctctgtaaatccagagctgctgcctcatttcttacgttgcccccacccgtgcagcaattcttcctgggaggcctcattgttcatattcataaagggccccattcagtctcctttttggagaaatggccactgcaactctctgttctgacctggggggaaatgttagaccctcaataaggagaatcagagaaagaagaaataaaacatattactccattcccatacttctgtgaagaaatacccgagactgggtaatttataaagaaaaagagatttactgaactcagtcgtttcacctggctggggaggcctcaaaattatggcagaaggcaaaggaggagcaaaggcacatcttacatggcagcagacaagaaagcgtgtgcaggggaactgccctttataaaatcaccagatctcatgagatttattcactatcaagggaacagcacaggcagatcccatggctttgactcagttacctcccactgggtccctaccatgacacatgggagttctgggaactacagttcaagatgagatttgggtggggacacagacaaattgtatcatagaatcataaaaattgctatttctaaggcagatgaataatcctggttggaaatcatactgatttagacttaaaaccattcagccttctttaccatttctgaatgtggccctgagggaggatttgtcttttgctattttctttttttaagagatggggtcttgttgtgttgcccaggccactctccaactcctaagctcaagcagtccgcctgcatcggcctcccgaagtgctgggattacaggtgtgagccaccacacccagcctgggggagggtttgttaaagaactgtctgttttatcacatgaccacaagttaaaatgttgggcaatgtccctgaatgataccttttcattagtaactcacatggacccataatctctgaatttaacatgcttttcaggaatgtgttcatattttccacctataaaacctgttttagtaatttactcccttgtaaatgttccttggtatgtaaatttagcatatttccttttaattgcccaggtaaataatacccaccatcagagggcaccagtagtgtaatcaccttattttttaaaatgtattctgtgtttcatgattttttctgaataactgatctttacagtctgaattgcattctgttgggcttgacttatttttaaattaaaagagactaacacattaaacactaagaggtcacataggatattccatttatataaaatatgcagagtaggcaaattcataaagacagaatacgcatcggtggtttctggggcggcggggagtatggaaagcctgttaatgagtacaagtttctttagttttttttggttttttgttttttttttgagacggagtcttgctctgttgcccaggctggagtgcagtggcaccatctctgctcactgcaagctccgcctcccaggttaatgccattctcctgcctcagccttcctagtagctgggactataggtgcccgccaccatgcttggctaattttttgtgtttttagtagagacggggtttcatcgtgttacccaggatggtctcgatctcctgaccttttgatcagcctgccttggcctcccaaagtgctgggattacaggcgtgagccattgcacccggctattgggtacaagtttcctttggggtggtgaaactgttttggaactagaggtgatagctctacaacactgtcaatgtactaaatgacactaaattgtacactttgaaataatttatgttatgtgaatttcatctcagcaaaaagaggctaacacataaggagacatattttgatacatgtggcatattaagctgctgttgttgttttttaaatattccagctgcgtgcagtggctcacacctgtaatcccagcactttgggaggctgaggtgggtggatcacttgaggtcaggagttcgagatcagcctggccaacatggtgaaaccctgtctctactataaactccgtctctactataaatacaaaaattagccaggcttggcgctgggtttctgtaatcccagctacttaggaggctgagacaggagaatcacttgaacccgagaggcagaggttgcagtgagccgatatctcacctctgcactccagcgtgggcaacagagcgagactccgtctcaaaaaaaaaagcacaaaaaatttttttcttccatctgtatcacacagttgcaacgttgtagcatgggcaggaaataattgggttgtatgtaatgcccagtaaagtaaacagatcttagagagggacaccgatccctaccctgcatggggttattcacagagccatggggacactaaacgtaccttatctcttgaccatgctattgattagttatgtgtttgcctgtgttattaataatgtatacattgaaaaatctatgtgcattatagtctttgatcttgtcatgaatttcaaagccaaagattccattttccttctttttaaaaaaaatttttcaaagaggtaggctggaagtaaatttaaaaattttcccctttctggcagagggcttttttctgatcaccacccatgttaattagatatgcatgtatgtgtatgtatgatgtatatacccatatacacacagtctatatatacatgtatgcgcacatacacatattttaaggaaagaattataaaatgatcaattcaagcttactatatgctagaggtgaggaatatttgaatacaagtcttatctagtagattaaaacagaaattaaagactgtagactaaggcaggatcaaaggacctcttttcattgttcttttattgtttattgacttcaaaaaagactttttagtttaaactgactgtaatgtctcttgaatggtcttttgtaaaatgactttgaaaactcggggataatgtcttcattaagtggagaaaaatcttggggaaaatataactgtaacttggctttcattagagtagaaagagataaagctttgcttaattaatgtctgttttccctctgttcagaagtataaggaaaaaggggactgaaattagtgctgataaaagcttgaattagacattatagcactgaaacttctttttcttccttacttagaatttggaagaacatacttcatacaaagctatgaagcatattggaagattttaggtgccctgtcttcctggatataaaatgactccaaactcagtgatactgatcagcctggcttcttttccacctttctcacttcattgtctttttgtgtgtttctgacatctgttgacaaatgggcaatcttggggatggggggttccactggtatattttctttactgtttaagaaagctcaaaattctctctgctcttttccaagccaccaatcaaaactgacattttctaagtgtcctcattgccctctgggaatgttcatggcctctgggagtccaagaactacctttacactggatcttcactgcttttactattgtgtggctttctaccagttctctgctcagcttctcttttctggagacctgatatgctttgttagcttagcatgctgttctaggctgcctttcttttttttttttttttttaaacttcatggtgagcagaacactgtactccagactgtgaggccccacctgtgcagcctgctggcttctcataccagcttccttctcaccttaaccccacgtattgttgcaacggcaaaaaagagaattgcacagaggaacaccacctatcagagttcacactgagtttgcagattcatccttttgcttccagccatcccatggaatgctgttcttggaagggtcatctcatggtccattgtcggccctcttagaagagatttcaggccttcccttgtagcttgatagttacagggagtgctagggtaagtggaaaaagcacatgacttggaataaagacttagtacacatcccatgtctgatttatactaactagttcatggacctagcctacgttactgcacctgtttgagcctcagttttcctgtctgcaaaggagggatgatggtacttacctcaaagaattgtagttggatcaaatgagttggagtgggatacagcaacaatctatattctgatttcagcaacactgtgcagtgtaattccatattatattacaccacatcttctgtgggtctttctttgggggaagctaacattttaaaaggtttccctttgtaacctgtaaccccctctaccccaaaagtatattcaagagcgaaacttttggtatgacgatgtcttacatcagtagttctgaatgacttgacttagctatctttcttgagtctctcaaaagacagatggatggatagattgattttgttgtaacacctgttcagttttgctggccttactcgttttcaaatactcaaatgccattgagtcagatttcagaggcaaatggtgatacctcaggtttgaagttgcaagaagtcaccacatgcttgttatggaaatcgtcagggatatttattccctctcctgagaagcataattgagcctccaaaccacccatcaagatatccacctgtaaaatatttaagaactggtactatgaagacatttcccttatgcaatttgttttccatctaagagcagaacaaggaaaatatagctgactataagttacaaaggcagactcttaagctacaaaatacatctcttcacaggagcacttggagaagggctgaaggcaaaccaaaagtgagcaacaaggagactagtgttctgaaacagagatgacaggctccgcagtgagggtgatgatggtgttacgaattacccattcagtttaaactagacattccctggaagcatgtcatggggtgtgcagaagggcttttggataaaaggggtctagttaagagatgttaaaaaaacaaacttgaaaagcatagcaggctgccaggacatgtctgagtaccgcgcagatagtggggaatagtctatggattctgcttacaccatggacaaccaggctgggccatgggttgtgttttttttcctctcattttatagaaatgttaccaggcatattttccctgtttccctaagaagagcttcctctcagtgctagccagccacagggccaagtgacacctagaggtgatcctttggttatttgctaaacagatctaagacaaaccgatatctgtaacctgggattagatagagccaataagatgtaactgaaattctcagggattctaagacatctacattgtatgttggtacgttattgaaggtgatgctagctgctataacaaataagcacgcctgtgcacagttgctcaaagatagtagaagtttatttcttgtttatgtaagatccataatgactcttgccaattagcaggctgctctcttccaagtggtaacccagggactcaagctcttttcatcttgtggctcagccgtctgacacatgtggcttccagcactgccctgctgttgtctgcacaaagctggtggaagaagtaggaatttgcaggaccatgtgtggagcattttaaggatgaggcctgggagtggcacaaatctttgaactccaggaggctaggaaacagagcataaccttgtgcccaggaagatgcggggcatagtacatctttgcctcacctgatgtattgtttgtttaaaatcactttggattctcatttaccttttccccctcaagatctttgtttttgactttggagataaccagaaataactaagcatgcttccttccctctacgatttcatcctcatggggaagcaagaccccactcttttattttcatgtatgtatatatgtatgtatgcatgtatgtatgtatgtttgagacagaatcttgctctgtcgcccaggctggagtgcaatggcaccatcttgacttactgaaacctcctcctcctggattcaagccattctcctgcctcagcctcccaagtagctgggattacaggcacgccaccacacctggctaatttttgtatttttagtagagatgggggtttcaccatgtgggccaggctggtcttgaactcctgacctcaggtgattgacctacctcggcctcccaaagtgctgggattacagtcatgagtcaccatgcccgaccagcaagaccccactgctattgtccagtgtggtaggtacctttgcctaccttctactctacaggctggaacaggtgatattgtgcctacttcacagccttcctagcaactgaggatggctgtatgacagattctagccatcaagtaaaatcagaaaccaacagcacgtttccttgaataccttttgctttctataaaatggtgtggcattgctggtattttcactcttccttcctaccctggatgctgatttgatgcttccagccttagcggttttcttgcttctaggactgaacagggaagagggaaaagtcaaaagaatgacagaaggtcctcacgttgcagaacactgaccaatgttggcaactacaagacaatcaggcgtgattcttcatccaggatctgcttttccctgtcctgccaattcttgagctgctaataaacattctgatgcaaacatggaatacagatttcagagggattctgggtagccctcggagatgaggatgctttgcgaatgtaacaggcatctctcacctcatttgtctggtggaatgtttacaaatgctaattaagttttgcttcaaatggggaacagtcctgtgcagtgtttctaggaagttaccagcttcatcataggaagacgttctccatcgtttggatctttttcaccagcaccttttgattgtggtggtttgggatgtgatgatctcagaactttacatcctccatgaaatctctgcagcgatagttgaatgtcttgccttttctattattgccctttttcttctgtgactttgtactgagacacatttatattagggtaatggcctcatgctatttgaaaatctttatttgggccacattggttggaagataaaaatatataagcaatagtccctgaacatcatttggcctgaactaggctagagtttctcttaatcaaaataataacgatgatttttccatgccaaggagtggtgtcatatcatgaagtagatttatgtacacattaaataaacttttacattttaatgtaccaatttgcaatttttttttctattcaccaaaatattccagataacggttatcagtttttgattctacacatacttcaaatactattaatgcaaaatccttctttagaaatgttacctaattccaatgtttcactttattcagcgaagacattcctttgattattctggttaggtgttatgatgccaatttgcccacacattttttcttaggcgcctatgcttgcagtagacagagagttgaggaaagctcaaggttaaaacaggaaaaagtaacacagtaaatacctatttttgtgcataattcaaattaaaaccccaaccacctagaagcaccaatacaaggaactggctgcatattgcattcctgtgacctgctgtcttaatgatggaatgactaacgaggatcagagggaatgtggtcagcctcttatctcataagccaaatgctgcatattccaagcctgtcaattctgaaagcccttgttcatttttaaataatgaaaaactttggggccttgttcattgtttctaaaggaagacatttagaaaatttagaatataaatttctgttagtagaaactaatttctcttgcttttctctaaagtatacttgatttgaaatatgtgccctgaagttttgctatgttgaaaaaaatgatgagccgggcacagtggctcacgcctgtaatcccagcactttggaaggccaaggcgggtggatcacctgaggtcaggagtttgagaccagcctgaccaacatgttgaaaccgtttctctactgaaaatacaaaaattagccaggaatggtggtacacagctgtagtcccagctacttgggaggctgaggcaggagaatcgcttgaacccgggaagtggaggttgcagtgagccgagatcttgccattgttctccagcctgggcgacaagagtgaaactccatctcaaaaaaaaaaaaaaaaaaaaaaaaaaattatgtcatttcgttgtcacagcgtcagcagaataaatcttagatcaagatgggattactgcgccactcccttcttcccagtctgtggtttagcacgggaaaaagcaaactagggcccttgggccaaatctgatctgcagcctgtttttgtgccgcctgcaggagaacatttttaaattgctgaaaaaatatgaaaggaaaaatatttcaaggtgtgtgaaaactacatgaagtttaaacttgagtgtccttaagtaaagttttataggaacacagtgttgcttatcttttatgtaatgtttgtttgctttgagaccgagtctcactctgtcacccaggctagagtgcagtggtgcgttctctgctcactgcggcctgcatctcccacgttcaagcgattgtcctgcctcagcctcccaagtggcttggagtatagacacgtggcaccacgcctgggtaatttttgtagttttagtggagacaggatttcaccatgttggccaggctagtcttgaactcctgacctcaactgatagacccacctcagcctcccaaagtgctaggattacagacatgagccgacctttttatgtattgttgatacagtatgacaagggaagagttaactgattgcagcaggttagagcacagcatgaagagctgacaatattgaccgactggccctctcagacaaagtttgccaacacccaggtgagcagatacacttatctgtgagcagacgtgattcaggggagattgttgtccctcctttcctaagaaaatgtggaaagatgagaatgttgccaccagtgctgatatggagcgttttttttggaattgtcttaaacaagtcccaaccttgactttgcctgtgtaccctactctttactcccaggtctttgcaaggtaagctgtcaggtgttagctgaagatacggcagcccaccagtggtcccctgaatgccaacaagagtcacctctaagatgatccagctgttgcatggtgtagcatgcctagtccttgcagcacacacgctgccattcttcttcgccgttgttaccgtattaatttagggatgatgagaaagtggcctccctttccctgttaattccttggaggaacttctgttcgaaatgaatagtcttgaaatatgtcataaagttacctatcaggaccacttttacagagatttaaatgtgataataagaataaaagaaaatgaagtgacattgaggacgtcttcttttataacagctctaggtcttgcctgttaagcacgctgtaaaatgactgttacacgtttatggattgaaatggttctgctgaaattttaagtgttaacattgttcaaattttcattactaacacctctcacattgttagaaaacagttttatgtttgacattttgatcatactaacctgggacattttatgctaaagttctcatttcatgccttaggaatcccctgcttattttgatttcagcacctttctgtaggacgccaatagcttatgtttgcacatcttaccccgatgcactctctaaaccgatcatcacagaagatattttgtagtgatgaagaaagcttaaatgtctcatttgtcagattggtttaggtagaaaataaggatttccaccccctcatcgtggttcccttttagattttcttgtttgcttttctttaaagctgctgttactcaaacgacagtccgtaaactgcactttattttttataacagctttattgagagataatttacatgctatacaattcatgcatttaaagtgtacaattcaatggctcagtctattcagagttgtgcaaccattgccacagtcagttttcttacctgaaggagaaagcctgcaccccatattttttacctcccattctccacttcaactcttccccagcctctgcgaaccgctagtctgctcttcatctccatgcgtttgtatattctggacatttctcattaatgggctcacacgatatgtggttctttgtgagtggtcctttcactttgcatgcatcatgttttcaagatactgcacctaatttttcagttccttgttttttcttacaaatacatttttcaaaatgagtaaacatatgtacaaaaatatttaatttatttaggcacgccaggtttatgagattcatctttgtagccaccaagagccactaacagtgctaacatagccaggcattctaaatgtgtttgtcaggtgcataaatctgtgactgataaaaccactgctcattacttggttcttaaactctccctcaatatagctgtagggacatgcaaaacaaaggctggctcattaataggatatgtctagagttctgctttagaaatcataatgtggacatcattgatttctctgatgctggaagctgctgctgcttcttcatctttatcttctcctccctgtgtattgagagcagggacctccttgtgctgttttgggctctccttgttcacccagattggctgcatcagcaccttcttaaaatattagtgttgctgagataggagcttttggtagatggataaactgggatttgtaaatattttgcttagtttttttcccagagttttgcagaagagaataaggtgttggtttgttataaggtggtcctttataaagtttagacctattttaataaggctgacttgggttgaagataactagagccatgactttcatcttgatggacaatgagtactcactctacttttttagtttatatttttattttagttcatttcatttaagacagcgtctgttacccaggctggagtgcagtgacatgatctcggctcactgcaacctacaccttctgggttcaagtgattctgatgtctcagcctccccagtagctgggattacaggcatgtgccaccacaccggctaattttatgcatttttagtagagacgcgtttcaccatgttagccaggctggtcttgaactcctgaattcaaatgatctgcccacctcaacctcccaaaatgctgcgattacattttaaaactctaccttttaaaaattagaacctggacaaagaggtattaaagaatgtgtctcttattaatttattatggtaatgagaagagtttggatttggacctacctaggtttttctttcctccagctccgccaccccaactccttactcatgcttcctctgtaaaatgatcactccccagtttgacaggaattgcccctggaatcccatctggtgttctaattgttaccaaatccaggcaaatcttgcctgtgatacaggtggtgaagctactggatagaactggagcatctaactggtgtgagatggtatctcattgtggttttgatttgcatttctctgatggccagtgatgatgagcattgtttcatgtgtctgttggctgcataaatgtcttcttttgagaagtgtctgatcatatccttcgcccacttgggtggatgaagctggaaaccatcattctcagcaaactgttgcaaggacaaaaaaccaaacaccgcatgttctcactcataggtgggaattgaacaatgagaacagttggacacaggaaggggaacatcacacaccggggcctgttgtggggtgcggggaggggagagggatagcattaggagatatacctaatgtaaatgacgagttaatgggtgcagcacaccaacacagcacatgtctacatatgtaacaaacctgcacgttgtgcacatgtaccctagaactgaaaatataataaaaaatacatattaaaaaaaaaaagaactggagcatcgactttcgttttcatttcaagacccgtcccccatgatcacagaggatgaaaagtctgcttaaattataagctagctaattgcttcttcagttgaagacctaaatgagttttaaagtgaaatgcatatctctaagggctaagtagccaacacaataggcaattgagataggaaagactaatttagaaaaggttgttttgttcgtttttctttttccttccctcccttcctgatttcccatcttcttcctccctcttctctcccctctcccccttctcctttccgtccttcctccttcagttccctctttcctctttttcacccttttatttaacattataaatacgatgggattgtgtctgcgcttttgttggtaattaaataaattatttatacatttaacacaatcttgaattaccaggtgatcatcttaggcactcaaaagcataagagcccttgaaagcaatatctaagcatagatattccatagcacgtcttacaatctaaatattgcttttagtgtaatcgaagcagcaagagtagtcacagcagttgatggactatttttcaaattgatttcaaaaatgtatttaaggggatgatcttctagtctagattacctattgatttttaatatgaaaagctcattatgtaagcagtaaccgcatataaaaacctagcaaacctttgcataaatcctttaattgaatttccagagcctgtggttctactttttttttaattaaatctatttctttttttaagtgttactgtgtaatttgcatgctgtgaagaggccctgtcccagataaagtgccattgatccttattaaacctcacctctgggcttgcttaaaactaactggaaaaattaaagtgttcatgccgcaatgcacttatagcttgtgtgataggattatggaaaaaataataaaactaatttccaggggagaatttctaatgtgagattttattttttttcaatttgataattaatagtgaaatcatatcatatatataaatcatattttagcctataaactgaaatggcaattaggaaagataatatatacttgatgtaaaaccatgttacgtgcggataatcttttagcactttaattttttaattgtagaaggagagaattatgaattcaagtcaaacacattaaatggtgggtttcatccaaaaaatctgattcttttactatgtactgtattagtggatttataatattagtgggaggaagtataaaagatatggaaaaagatattctggttatgttcgtgctaaaatgtgtgtattagaattaccaggggaaagaaaaatataaaagctgcaataggtttttctattttttaatacctaacatttgttattttaaaagcaataaaatcccctaaagaaatattcgtaatcaataagaacacaaaatatggaatatattaactgagttataaaaatgtttgtagtatagcacagaatgaaaaacacagcaaggtatgtacggtttaaagtgtaatcaattttgaggttgtatacaaggatataaatgataaatacaagtagtagcatttttagtaaaggctgttacaaaatactgtatttatggcctattccattctttttatagctcattaatgtagaaaacaaacacagtgtatccatcttctcagacggtttaaaattcccttaaatgatgtttttaaatgtaaataactgagctcatttgatctggttcttccttaagccaatgttagcatgaatggccatatttaccaccccggggttccttttcagactccggaaagaaaaagcgatgataatgacgtatttccctcccttccacaaaacagggccaggtgtaacacactaagaacaaatggcttggcagcctactctcctctctcgaagctccatgcccaccttgctgttgcaccccccaccccaaggaaagccttcccacctttggaagctgcattaattattccaggccacaagggtgccgttgagttactggttcactgcactggctggcaggaaagagttttaatgcaggctccaaaggtgcttaatttcctgtggtccttatgaatatgcatacagtatgtgctcagcaatctagcagttcaaactagacagctggttctggtggtgagggttttttaaatttattttttatttatttattttttctctcccctttccttggacaagccctttctgaataagctgaatctgtagtataatttcattaactcatttccagtatttaatttggttttgatatttccatcatggccccttttctcctttgattttgtcattctgtagaagttgataatctgtattatgatcaacaaggcatattgccatgactgtaggaatcaccaatttagatatccaggcttcctaaaatataagtaagtcagatttagcattactgttttcctgaatgtaggagtatttggaaaaggaaaaaaaaataaacatacatcttggaaagcagagaaaggtgttttgttttctttctgtttggattaacatattctccatcactgtgtaacttcatccaatacgtattgaatacctactatgtgtctggcaccacttcagacagtaaggatatggatatgaatttgtatcagtcaagccttccaggatcttattatctagagagaaagattaaaacatatgcaaataattttgatagaagcaaagacctaactcagcctgagaggaggttgggtttagagaatgctttcattgtaatgttttaaagctttttatttataactatagtttatttggactttatgatttaccaagtaactttagatgcaaatatggtagtactgtgaagattatggtttttgaatgaagtcactttgtggcatgatggtatagaataagatattttcatagtgaaaatggagataagacatgtcccattccctagaatagactgtcactgctctcgttgcctccaaggaggaaactgttataggaatgattgacatggaggttcatctgtagaatatggacagccctctacaaattgggaacaagggccaggacacgaaatatagtgacagcctctggcctgggagtctagacagtggtcaaaggcaggattcatggagttttccaagataagattcaagacccaaactatgaatgaaagccaggctgaggctggcaccaagtagaggcctccaataatgttgacccagcggggctgcattgttcactgccccctcctgggaaggaggaaccaatgacaatggagcatctaagagacaagagaaagggagtgtaaaggtgaggattccatggctttacactccagaaactcaggctagcttgttctcactgaagcagtcataccttctcgaaggcaactaggtggattacagaattgtgctgggtcctatggagtgtcagaaatagtgaagcttctggagcttcactgtccaatatggtagccacgtgtgactattaaaatgtaaattaattaaaattaaaagttcaattgctctgaaatagcagccacatttcaaatcttcagtagccagatgtggttattggctaccatattgggtagcaccgatatagaacatttctaccatagtagaatgctcttttggatacatctgctttaaagcattagtccccaaagtgtgaaggatgaaccacttgggttccgagaggaaacattataacttctgtttatccattaaactctttcatttattattaaacatctcaacacatttattgggtggcaggtactgttttaagtgttttgcatatatttacatgtactgtcctttcaaatattctttgaaataggactattgttgtccatatttcacagatgaggaaagagatgtgctaagaaaagaggtggcagagtagggattccagctcagtagccactttcagggtcccgtacttttcaatgtaagcatattggctctcaatttaaaaatgttattttttacagatagtacacagatgcactgacacaggtaccctctccagtcctctgatggtcaggaattgtgtgcagtatgcagtacattccaaagtcaggctggccatttccccagggagagggtccatgttggaacctttgctccttgtggactttagctttgaaatgtattgtagttttgcatgtgtgcttagttggatggattgagacatcagattatgtggtctgaactaaagcaaccgtcacagaatgaacaagagacttacaaacatttgtgcaaaaagatcagtgtttggatatagttcttagaatagcaaatagtaagaaaagagcaggattggtacttcacctactcctaataaaagcccttcatcttgtgcaaagtaaacacaatcacagtttgatcagaagtggtcaatggaaaaacaaaaatctaaattagcaaagagaaatttgaaattgcatgcattatttttaaagatgaacattgctttaacctataccattcctggaggtagtagctaatagaatgatccaagtttataatttgtaaataagtagacatcttttgaggcgtatgcccttaatttttctaactgatgaaagcgtacttccatcaactcaagacagttcaaagcagcttggagcctcttggattttaaaaagactctgtggcctctgtctctcttggttttcagtgctcagctgaggtctactctgtttatcctctgcctactagaaggatatcctttcaatagaggtgaaaatcctgaaataaaaggtttcataaatggggaaaaaagtcattgattgaaagagtcatggcatagatgctgaagttttgatgggaactttgcaggatgttcgtttgtttatcattagccctgggagagtcatccctcacctcccaccaccccttaatttaaagggatttaaaatattttcaagtacatcctgatatcagcacgtggtacactgagcctagttgatggaattgtgaaaaaaaaaaagaatgttttcccaacaatttggctgtatttgccagaactgtttcaagaatgctatgacttttgctcagggcaagggaagtgtgtgtgtgtgtgtgtgtgtgtgtgtgtgtgtgtgtgtgcgcgcgcctgcatgtgtactgtggatgtgataagagctgtgtttgtgaaaactgtgaagacataacacatatctatgaaccttttctattaatcttcttggggctggagctttaaaataaaataaataacttttctgcagagagagaacctttccttacccaaagatttcgtaactttctcacatccttggttaaggctgagctgcctagctgtctgcatttctgataggttttgctttcatacacatttcaaggacttaagaaatctgtttctaaagaataacttagaatgtgcttgttatggtcccacctattctggggaataggtggatattatacatttatttaggtggaatggtgggtcagatggcttcatgtctttttacatcacagttccacagccctcattagtgaagcagaggttgaaggaggtcacttgctttttatcccaatgtcaaataactccataattttttttattattttttgagacagagtcttgctcttttggccaggctagagtgcagtggcgcgatcttggctcactgcaacctctgtcgattctccttcctcggcctccgtagtagtcaggactacaggcatgcaccaccatagctggctaatttttgtatttttagttagacaccaggtttcaccatgttagccatgctggcctcgaactcctcacttcaggtgatctgactgccttggcctccgaaagtgctgggatgacaggcgtgagctgccttgcctagccaaataactccattatttaagaaaaattaaccagtatttattgaatacttactgggccctgtgctaagtgctttgcatgtgatttctaatttcctgaccattctatgaagtggctactataattatcctgatttcccaggcagagaaactgaggcttagagagttgaagtaatcaactgggtgttaaaaagctggtaagtggcagagcacttattggcgctaagactgtttctcaggaccttgttgtacgagagtcaacgataagacgcagaacgtatgtttcatttttcttgggaaggatctatctcactcatctgccttcctgtgtctagcaagagggccaggcacataaaatacacatggtacaatctgttaaaaggcatgaaaaagaaacagtcattcatatctgttcgtagaagtgggcgtcaagattttggggcactgagatctatgcatgttgtgggcccactttaagaaaaggagtcaaacatttagtgtggaatactggaaggggtccctagacatgaagggcctcttcaacctaccttttgttggcttcaaggttatgccatattttgcaaagtcaagttggagatggctctcgatatgcatgagtgtgttagactgcttttcttctattttttaaaaatgcacccaaatgtaaaagatacttttacctttttgatttgatgttgaaggtcatttgaaaaatactctgtctttattctttgaaatggatttactctcaagaaagttgcatgtcactttacttggaagagacgggtctcagtgaggtgtgcctccgctttcatgaaaagtctcccgtctgcagaagcattggctgacatggaagattttttttttttttaatacttttctttttgccggcatctgcgtagaatttttttttttttttttggtagtttcttaatggtctttagcaaaggaagtaagtgacactgatcggtgaaggcagacagtaagatttataatgtatttgtgctagctgattgccaacagaaccggcctttcccagtggtgctgtacgcagactcggaaaatcaatagggattaacctttgacccccttcacatacttatactgtgggctgcatcgcttaccaatatttcatctgtttcacttagctgctgttacttactcaataatgtgtggccaatctcacaagatactaattctttttttcaaatgcagcatcgcttgaagctgtgataaaatatcacacctttggaaatcaaggctcttcttgtttatttatttaactcacattaattagccttaatttaaaaaaaatgagaagagccagcatcatgatgcaagcattgactttgctcacaaaaacatcttgtggtcaacagtggggcttagggggcaggttttgtggctgtgacagaacacgtggcccctagtgtgtctgttgaaagatgggcccctttcaggaaaatggcttaccttactttttagacataatttttgttttctgttaaagggtcagttatagataagtatgctcccttgcaatgaaatgaacccactttatcaattttgaaggaatcaaaattaacttgaatacattgtctttttgcatatgtatgtagtgctttgtataaacatatgaatttgtaggagctgctcttaatgattattactgcataggctggaatagaagcaaaatttgcagtaatacttttgtacctttctctttaggccttggcatatattaaagtactatacatttgtcttaaaaattgaaattgtagattattttcatctaagacccttttgttcacagatttttttttccaagtatacctattccccagagtttacttacagtttgctattgatccagcagctggtatttgaattggtcgatatactctgtaacttgtttaagataccctacctgagctattagtttaaataatgtattcataaattgattaatcattacagtaagacttattagctgcatttatatctgcgtgttatccacaattgacttatagtctaataatcacgtatacttaagcagaagttgggttttacgttacaatttaataattatcaaggtggcaaacggtagtatttgtgtgtagaagttgagtggatgtggggctttaaaggcaggagtctctaagcaggttgctaattttacttttcctagataaaataattctctctcccaaaatgaaatacaggaagtggaccaaattgtgtcagcctgaaagaagtgattgagtttgcggaagctgtcctgaagtcgaggttctggaagatgggtggggtggggggaagcgaatgtgaagtgccattgcatttgtctccatttctgtcccagttacatcaaggctgggaggaggtctttccactggttttccgggctgtttgtgtactacacagcctgtgtacctggcaaggcacgctctgctctgccctgccttctgatgagctgactaacaccttatagatgaggttcccttagaaccaaagatgccccatgaaactccctaggatgaatgttggaagtccttccaactgggattcccagccggaaaggaaacagttcatctgactacagggtttaggtttacatgtactttaaaaaaaaaaattaataaagtttatttttacagtaattttaagttcacagcaaaactgagtgggaagtgtagagtttcatatactccctgtcctcacacatgcacagcctcctccagctatgcacattttcaatgaaactacatgttcattgaaaatgatcttttgggtggttgatgttcgattttggctctgtgttgggcctgcccagtgaggtccttttgactccctaaggaaccctgttttgggtttcttttgaggttgaagatatttcagactctttccccctcaacttccataggaaccaaactctctttcttcctcccgtttggttggaaagttattttgcctcactgcgtgatttttctactgcaccaactcccctttcaaacgttattccacaacatactaaattaatgtatactgtgttctttgggtaatggggaggggagcctgtctcacagcacgcatttgttcagctctgtgttgaaagagcactgcccgccgcgtgaaggacatctgctcacaagtgagcaattgtgcttctgatttggggcagcacctttgcttgaacgctggctccagatgaaagaacagattgccgcggagccgcttttccaaggatccctctccccagcatggggcttcatacattattgagagcaaacctactttccaccgccactcctggatgcacttattttgcgagccttattcagaatgtcagcatggatcacttggcgacaaaggcctaaagggcaagccaggaagcttccatggatacgttatttatggtgtttaattattattgtacagatttattaaatgactctgttacctaggagtccatgtagttgctgaaaagagtttgctaactttgaatcgtagatgttttatctgaaaacaaaatttccttgtgaatgctgttaccatattcctggtgtctatgtgagggggtgtgtggtggtatgccggtaagtgttgaacaacctgctctgttggcgggaactaggggaaacaaaccctgttttgtagtatttgctgattactgtggtgtaaatactcacaccttggctgatttcaagttgcagcttggaacttggagttagaaagagatgtgtagtcccataccattttatgtatgtaaagtatttgcactatgccgactaatagacataaataacctcatgagcatagataatagtcacatctactaagattattcagaagtattgagctttgagtatgttttacctttttaatatagcttattgaatcatacatttatctactttaatacttaataatgagtgtgcccaacaactaggtcttaaagttcctgatagtttagcagtgtgctctcttaagccagtcggacctggttgttgtacactactgggtgtgtttaattgacttccagttttgttttgttttgttttgttttgttttgttttgaaacagtctcactctgtcgcccaggctggagtgtagtggtgtgatctccgctcactgcagcctctgcctcctgggtttaaggaattctctgccttagcctcccgcgtagctgggattacaggtgcatgccaccatgcccagctgatttttgtattttcagttgagataagggtttactgtcttggccaggctggtcttgaactcctgacttcgtgatccactcgcctcggcctcccaaagtgctgggattacaggcatgagccaccgcccccgaccattgtctgtcaggtttaaattgcaccttgggttcgggtgaagttgatgatctattcctaatgcaggctcattcctaacagggcatccctgcacaattttccgctggggtgtgatgagctgcttcgcatcctgctaagtgtcctcgacagcgagcagacacatgtaccctgcttggtacatgccagatgattctgttgtagtgatattaaggacaacagtattttgccagaagctataacgagatgattctataacaacagcatggtgacatcagactatgttttgcaattttctttaatatttatgctggataaataatttatcttttttctcagttttttttcccttttctttttttttctccccatcttgaacatgttgctgtagacaggtgctaggtttccctgaatgactaaagcagagatttggttattttcctcccagaaaaagtagatgcatcagcagagttgagcccctgggcattatttccccaattccgtatcccatctactaatacaaactaatgagatctattaaggatgagtccacaagtttgaagggagtctcttactaatgttccgtctttgcatggtgttacaacagcgggaccattttacactgagggtttgcgagaggcatggctcccctgttatgtatttgggacttactgcagatgcttcctctggttcagggtgttgaggcttcgtgctgttaatattggaaggtgggtcatttgtactgggcatctgtcctgtatcttggagatgtttagtaacatccctgacctctagccattagataccatctctcccagtagggataataaaaacatgtctccagatgttggcaaatgtctggccttctggggagtaaaatggcccctggttggaaactagtgttccagagctacattcttagctgcttactgcatcattgtttttagccctccttttctctggcttccaggaaccaccaatcccccaacactaggatagggcataaggcaaccttatgtcaccaaattaatgtccgcctaggcaagctggactgcagaaagaaaagcagtatttctaccctaggatcattatcccaccttccccaagcttcgaaagaggtacaggagtcctcagaaatggggcttctaaaataagtggaactgggacctcttctctctcaggctgttacttgttgtggttccagcctattttctgagctgtggagcagggagggatctcacaggaaacttggtaatgtagattttggaggacttgaaaggttcctgctacctttggctggggatggagggaacatggaagatgggtctttgtttagaggaagctctttatcctggtacgctggaagttggcatagtcttagcagttagtccagatgtgaatttcaggattattctgtgagtcttccaagtcctgtctcagcagtgaaataggctcagtgtagcttatgtctaggtggctgagttcattttctagtctaggtaaagggcacctcctgtaattgaattgtgtaaaacctgcacagtggtacacctgagcccttttttaggacccaagagtgctgagattggctcttcctgagattccctctttaaggataagactttctgatttttcaactggatttaccattgtggcatctgcacatgagcagactgactgctttttggccctacctggagcctgggtcctcaggtagctgacccgagagaccgtggagctgcttgtgatatacaatgtcagtgctctgagctcattaggcgtcatctgagacagtggctgtaggggaggggaggtaggctctgagtcaagcagacctggaattttctttatgggccattaggaactgtgtgacgctggggcatctgacttcacctttctgagtcttagtttccttacctgttgaataggtctaatgatatcattatggcagatcagtgggacgattgagtcaaataacatgcccaatgcctgtttctcagagtaggctttcagtgggccacatctgttgtcactattattttgttctttctgccatttgggatgtgctttctgataatggcactaggctgccttgttgcctcctgcatgtagaacacagaacttcgcagtctctgcagagtgtctaaatcctgctctgggccagccctttcagaaacacttcaggagatcaatagttatctgcttacctttctagctgagatgagattttatgcttgttactagcagatcaatagtgaaagcaggttctgttaagttttttataggagtcattaatctccctcagcctcagtttccctatctgtgaagtgagtctaaccaggatgataatgaagagttaggtcaagtgaggttggcagccagacacccaccaccagctgtaacataagaacagatgttctctccagacccccaggtcagctgaggtcgctctgcttggaataatgaactgccacattgaggatttttttcctctctttacttggccaaatatccgagtgtggaagctctcactgtgaacctgctaacatacatttcagtgtctacaaaatgtcttttgagagaaaacagcagggacattcgtgagctcttttttttttctaaccactttcccagtgagacttcagttttcattctccccttagcagctttcaaatatgtacgtaacacaaatgttacatgtttgagcatttaaactgaatttggacagggcttctatttccagaaccttctaactctatttctttgtgacctgatagtcttgctctccagggtaaaagaagaggatggaaatggctgtggggcgcctgagctgggccctggcatgatggcaagatgccgttctgggttcactgggatggctcaaggggagtttggaaaccctcctaacatgtcatctgaaatctgggaccacagttccggctggaacacttgtcactaaagctgctgataagcaaagggtgtatcactggtatgggtaacagttgtgggaggaggaggggtctgacagatagccggatgattttaatgtttatattccactggggtaagctctaacaaagacccatcatttcccagataaccaattcttttaaaagaacatctgttgaaactggcaatttacattcttcttaaaatacggagcgacataattaaccctctggggagactaatattagtttattagagacaatttctagttctgtttatttttaacactaaacgatttgttcagattggggaaaaaattttttttttttttttggttgtggtggcgttggcttttacttggggttgacctttccttatcaaggacgtacaaggtgaatagctgggtgataatatatggtcccatgatcatcaaccaagcaccaacggaagccttttggaagtgcacagtattgtttaacacacaaataactcagcgtttagtaactttcaggtacaatcagtctattttaaagggacctcatgtgttattcatgtatgtgcacatgtgtttatgcagttacctttgtcttcattgatttggactcctttggtgctcgtaattggtgaaattctcttgtgatcattgttgtagttcccgcaaatctatttacggttttcacaaggaggtcacgaacatgcgttgttttcaatgctgggctagtttcagacttctggcttgttgtgggacggaggagaaagaagacagggcattttgatgtggcccagagaccaaatgaaacaaacgatcctctgattgctcagatgtcctctttgacttggaaagcacccacgtgaatgttgaaccatttggccctcagttctccgtcctgcagcaaactgcattgactcctgttttctacacagtggtcttcagctacaccttaccaagcaccccttacccagcaaacgtggcttctcttccccaggcagagcagtccgttacttagactaggaaatggctccgagaagctcacccatcaccatttgctctactgcaaaacaggactcattagcaggagctcataaaatgaaactggcagtgagctcatatggaagaggcatcacgggcaactcggcttggctcaccagcccctgagctgcccccgagtgaccgctccagccttctttccttccacctctccctcttggccaacttcatgcttcagccaaagtgaactgagctcaccaggctgagtcatctgtgccagctgtgccctctccccgaggctgcctgccatgctcgtgctttcttgtctattggcaaaaggctctccatccttcaaaatccagctcttggcctcatatcttccacaaagccttcccagacctttactcacctgggccattaatcaccttccctctcagtcagctgctacaccatgagtgcttttgtatcgtgactgtctggttacaaggtcatcttttcccctggatgagacgccccttggggaaaggaccaagttttattccctgtttaaccttggcctgacaacctaataggtgctcagtgaacagttcttgaatttaattctctccctttccccacactgatgggtatttaagctccagtggtactcgatgtgttgttttctttgttcttttttttgagacagggttttgctgtcacccaggctggagtgcagtggcagagtctctgtgcactgcagcctccgcctcccaggttcaagtgatcctcctacctcagcctcctgagtagctgggactacagttgtgcgctaccacacctggctaccgtgtcttgttttcaatgcagtatataagagggtgcattgtgtacctgtgggagtgattacagaatcccatcaaaatgggaatcactgactgaaaactggagtttatttgtaagctgggagatgggagctgaatttgaaaccccaggagaaaatagcatataaagtcattttaaataactatcatttgcagaggaggggggcacagatgcctccagtggcccaagactcccctttacacattgccgttcccttgccttctactcctcttttcattacccttatcaagattctgcagcccagggtgctgcttgttgatggacatcttcacctgactttctccctggtccaggtgcattttaagcatggaaggtgacacttgccattctcaatggacaaagggagtgggggtgtgggggtgtgctttggggttagtctctgggttttcgaaacttagcattctcagattcccagccaactggtttcacatgacaagtaaatgagcaacctggaagatgagtggcgtttccacacacagggaagcagatagttccattaggtgacagtgtgtgcacagtttatggaggatgaagcgggaaacctgagccacaaggcagtagaggttggacgagacactcattccgaaggcgggtgtgtatgtgcaaactgtataatttttttcttcttttctatctgctagcaaagtgggtaagttgacccatgacatcgtccactggagggaccacatttgtgactctagcaattaagcctcccttctcatctgtggataaaactgacctcccagtgtgctggagtcaaacatattcagcatccaatccacattggactgtttgcatgtaacgtacagaacactcattcatctacatctaggaccataacagcgagcaggagacagtccctgaccctggggactaagcccaggacctgccactaggagatattcatggaatcactgtttctcctccttttcaaagaagactgaatttatgatgaaactttcttcgtatattggctttgagaaattctgttttggtgcttatgtgctctggataattctcaatgactttcaaagttatgattcagggagtaattggttctgagagaatatgcataatcacatcaaggtgtgtttgttttccaccatttgtagccttttgacaaatttctgggggcctcatgcctgctaggccgaatacttgtgtcccttgagcctggagacggcaagtacccagtgtgcatgcatgcactcccaaagtcctttattcacgacagacatcactaatcaatcagtcatgcttagcatactactccaagtagtcattactaatcatctctagtcagcatgggagatactctttaccatcccggtaaagtgacgttttgatgaaaacagcatggatcttcctgcagagaacagactagccccctgtacagcacacaactcggggaattttaggtttggtgatttactgctgttggagcctggacttcttcctgggagaaggctcgaaaaacttcatgtcagttacttaatggaataatacatgtttcctgcttccattgtcttcctggacctgacactcactctttaaccataagcagaagacacatacacaaatgtcctatgttaagaatctttatttaagacaggtggctagcattatttgggtccagaagcttccctggaaagaaaggattcactgcaagatcgacaggcttacccagttcatttaggcgtggcttgatttatgcacacaaagctttgggaacatatcagtcacatcaagctaggtccacctgtgtgagtaactaacgtgtttatttatgattttctttaacagcacagaagagcaattgcatttggtcattctagtatcaactgagttctttataaaatatctttggggtgtttaaggagaattattctttttacaagttctgattaatgacaccgcaaaaatgaaaataatgagctaatatgtatctagtacttgctatgcacttatatgtatagaagcgtataatccacagcactccttctgaatacgttacgtaaatggaaccctcgcaacagtcttacccccattgtagagatgagaaaactgaggcatacagaagagatggaactaggccaagagcatagaggtggaattgttgtgtgagcctgtagagtccgtgttcttacccactgcatgatgtctgatcatcgtcaattttctttccatttggatagatgaatggtaatacttccctactaggtagagcaatgattccagaagtttataataattggaaagtgtattagtcgattctcacactgctataaagacattcctgagactgggaaatttataaagaagggaggtttagttggctcgtggttctgcagactgtataggcttctgcctctcgggaggcctcaggaaacttacagttatggcagaaggtgaaggggaagcaggtaatgtcttcacatggctggcagtggaggaagagagaaagtagggaggtgctagatgcttttaaacaaacagatctcaggagaactctttcacaagacagcactagggggatggtgattagaaagcacctcatgatcccgtctagttcctgcagagaacagattagccccctatgcagcacacacctttgtgaggtcccttctccaacacagggattacaattcaacctgagacgtgggtggggacacagagccaaaccacactggaaggtaaaaaagttggcaaccagaggcttagaggaggttcaaatctcaaagtgatgtctttccttttgcattttggatggtttaataaataagattgatacaaacacaagcattaagcaaacaaaaggaaataaaaacggcaacaaataaaacttctgtgctttttgaaattctgtttttggcaggcaacattccaaagatctttttcatttaaagtccaggagtcttctgtgtgaaccccacacaggtaccttggaaagactgcatctcctggattttgcatggttctggcttaatggacaacatatcagtcattttttgaggaaaataaatttaaggcttggtcatcggtccttgagtcagcacattgagcgttttgtcaattagctcctccccccatctttatggtatggcttttcctgtaattacagtcaagatcctatagccggaggaaggcctgtcaattgagtaagaggctgatgttcatcgcacagtgacagcccattcggagggttttaggcctgtccttagagaggcttgttatttcctctttcggtactttgttgcaacccagctcaccgccatcagatgagtggaggtttcttatgctgtggcgaaacccagggggtcaagcccctcggacatgacgtactgcaaagtgaggatgtttcattgatttatatttttaaaattaaaaataattatttaagctgcatctgtgtgcttataagaaaagatatagaaagattagtagtagactgttgtgttcttttttttttttttgagatagactcttgcctgtcgcccaggttgcagtgcggtggcatgatctcggctcactgcaacttttgcctcctagattcaagcgattctcctgcctcagccttctgagtagctgggattacaggcgcccgccaccacacccagctaatttttgtatttttagtatagacggggtttcaccatgttagccaggctggtctcgaactcttgacctcaggtgatctgcccgccttggcctcccaaagtgctgggattacaggcgtgagccactgcacctggccagtagtagacttttgatagggttttttttctcaaggtgtagatttggctaggaagtcatagaaaatggtctttttttttttttttggagatggagtctcactttgtcacctaggctggagtgcagtggtgtgatctcagctcactgcaacctccacctcctgggttcaagtgactctcttgcctcaacctcccgagtagctgggactacaggccaacgccacggcacctggctaatttttgtatttttagtagagccggggtttcaccatgttggccagggtggtctcgaactcctgacctcaaatgattccctgcctccacctcccaaagtgctgggattataggtgtgggccactgtgcccggccaggaagatggtcatgttttactttgaaccaatctgtgcttggtttatttttttcagtgagtgtggattacgtttataattttcggttactagttaggtaaagaataaaaattaataaacacatttatagttctcagagattccttgagagaggaacatctttaaacggataaccacagtcttctaaacacctgaaagggtgtcttttgctgaactatggagttttagttttgctttagaatttttggatgattagacttgtacttcttttaggctatttttccacctggtactatttggctttactgactgccctcattccccatacaccaccttgttttgttcagattcccctaaatcttcattctcgtcccacctccccatcactcctgactacttgaaacacgacttctgtcctcagaaggcagcagtgttccctcctcccgttcatttttcattttcccgttgcttaaaaaaatcaagcatatgtttgcagtcatcactgatgttctgcctcctcttctaaagttatagatgagtgccaagttggcagagcatgtagaaagatcactgcagatgtccttgtcgtgttgaccttattggagaatttcctatctgtgatgacctgtaaatggaatttaagggaggaatcaaacgtgttagcacggggttggcattgcgtggctgttttcaattaacttgaccactatgataacatcaaaggtgtgtgtaccattctatgaccattgaatctccatggacatgttttgggaaatggatttgtcccattacactgctttctttagtgcataagatcttgaagggagggatgcattctatgcaccccaagtttctggtttactcgtggtttcaggtgtccctttagacaacatcactgacaactcactatgtaaaaccaaacaaattattagctttcttactgtgtgtttgcatttgctgtgcccagggaaatgggaagtgcattgaggaagaggccccaagacatggagaagtcactccaactttccggaaaccccttttgctgtgccatgtgcatggaaggagaggaatgaatgactgttgaagccagatggccttgctcattgattctctcctttcccgccctctcaagccatccagaaggagaatgaaatgctcaaatcaagggagttaactatggcaaagatgttagtaatgggaaactttggaggaaggcaaagtcagaaattattctgcagggagatttggggatgttggatgctaaggcccaagccgtctattgtatgccttttgctttggcataaaacaacagatgaccttctgttaggtgtatgtctgctcatgcttgagagtggtggtgtttggaaagactcaatagcatatgcacatgaggaagttgaccaaatgattccacagcacatactcatttttttgctctgattctagcttttcctccaattttattcagaatttgttcttttcttacctcacaccatatagaaaaatcaactcaaagtggattggagacttaaacataagatctgacagtgtaaaattagtagaagaaaacaaggaggaaagctccatgacactggtctgcacaatgagtgtttttgtatatgaaccgaaaaacaggtagcaaaagcaaaaatagacaactgggattacaacaatctaaaaaatttctttacagaaaggaagcaatgaacagagtgaagcagcatcctacagaaagagaatatttgcaaaccacacatgtgataaggggttaatattcaaaatgtacacacagcgtaaatgcaagaaaagaatctgatgtaaaaatggcccttccaacatctagcattattgtgtgttgaataaatacttgtttgattaggtctaatcactcttcatgattggatttccaaaatgtggactctcagcaggacattacagggacagtggttgggtctggagatgtcacccttagctgtttttcacaatgagaggttgttttatcataaataaatcaataaatggtagattatacaccggagttactgagaattataaaaaaattaaaaaagcccacattttaaagggaatttggtatttttaacaaagcatcagggggctgggagcagtagctcacgcctgtaatgacagcactttgggaggccgaggtgggcggatcacaagatcgggagatcgagaccatcctggctaacatggtgaaatgctgtctctactaaaaatacaaaaagaaattagctgtgcgtggtggcgggcgcctgtagtcccagctacttgggaggctgaggcaggagaatggcatgaacatgggaggtggagcttgcagtgagccgagattgtgccactgcactccagcctgggcaacagagcaagactccatctcaaaaaaaaaaaaaagaaaaaaaagcatcagggttgtcaccatgaagcaggaggagaaaaataatgctgttagacttcttaaagcgtattttgtggtttattttattgctctgtaaattgcaggctgtaattcatggggctcaggccagtgatttcacagttgatagaccaggcacatctcttcccaccccttccccacctaggggcaaggttttcaggaagagccccttttctaaaccacacatggcctgctcacaaatcttatgataaaactctacccactgagaagcacaaggtgtgaggctattgatgaggagttgaaggtgacagagaccgagaaagtgctgcacacctttggcctaaagggtaatgagcaacacacaaggattgggagatgttcatggcaagaaaaattcagaagggacattgttgtttcactaattctgtaaaggagagcagcggcatttacttaggccgattccccattctctctttctgtttttaaacagagacagatcttgctctgttgcccaggctggagtgcagtggcatgatggcatgatcatagttcactataatctcgaactcctggtttcaagtagtcttcctgccttggcctcccaaaatgctaggaatacaggcaggagccactgttactggtctgttttttttccttaaatacataggcaacttcctcgattgtctctcctttattggcattgagagataagcacaataatgattgttaagatggaatattatgaaggctcaaggaatacttctgaaggctttttgtctatgaagtacacgaggtttcttaatagtttggcctctggcaaaaatggttttattgtagtttcatccttgttgagtcaataattaactgagtttgattaaagctgaattttcctaagtatgaaaaccatgtgggcccttctctttcctcgtgatgcacggtgatagtgcgtatctaacacttgaaggtgtccacgctggccctagctcagtgagatggctttgctttgggggggtgagggggcggaggtggtggaaaggcagcaagctacgatgttcttatgtgtgtggccttgcttctggtggtggggtggcacacatgctctgtagtctttctggatgggtttggcccacgggagaccccctggctgtccaccagcccctttgtgatagtctcatagtcttatttgtcttttggcttgtatcccacctgttcactttttaccatagctaacctttctaagtggtcaggtgggactcatggagattttccgttctttggcaactagcagcgactgcagattactcatcagctgtctccttgagtccacaatgccgggcggtggacgggcttcctgcctcctggcccagggcccctttgccggctcttagtgtagagcactagttgtaccatctggtagttgtttgtgcctgcgactctcttccctattaggctttgactccttaaggataagaaccatgtcttattttttttaatctgtagctccagtatccagcccaggacttgacaccagcctctgtcaaatacatccgtggaacgcatttgtaagaaatcgaggccaaggcactggaagtcccattgtctctggatgctgagaccttgaatttcatgccatggacccctcccttacattccgtctttaatgtgctataaatagacattcctggccttgcctaaataggattaagtagtaccaaatggtccttaccgttctgaggcctcactgagactcattttgaatctttaaagaaagcagtagagggatggagaagaagtgggtcaaaacctggtttctgcctgtgggaaaatacaaaacaacacaacagcaaagcagactagcatggttcaaagcacacattgaggtttttggtgtgccattctaatgcatgagctcattttgagccaaggatagctttttggtgtagaattttgccagtcctacggtcaatgcagtactaattgtgtgtgtgactttgtgcagtggggaaaggtggggctttaaaataaaacagaaggtatgaattgcttggcatttgctgtggttcctaagtctccattccgcttgccaagattaaattgaattattcccgctgccattcagttttactctgcacaaaatacagccaacatttttgcatttctttcttccttcctccttttcttctttccttccttccttcctttttcccttcatctatctttgttccgcttttgtttgtttttttttagatcgctgcatgctgccgcgttgggttaaccatggtagcattttaccatgagaagccatagcaagatgtgccaggtgcatgctgctggaacacctggctgaggctccaacagcattttcctatgactgagggtagggtaggtagatgactcattacaatttataaaatggggggcttagcttgggtatcatcgtggttattccaagcagtcttccagctggactagcttttcgggaacacgtgtgtgtttgtgctggaagccccagtaatatcatttaattcgaaagcttttttctatgatgaattattcaggcagtgtttaccaaaattgtcattgatcagtacagacccagagagcatgtacaacagcgcctgtgctgggcctgctaggagtcgatattttctggctcaaagaagttccaaaagaattcaaagccagtgtgtctctttctctggacggccaagtgatgcaggtaccacgcttaggtctgctggtgtttagcttgacttaaaacccagccagggaaatatgtttcactttgctggggtgcaggtggaggaggctattattcttaggcatttaacagtgaagaatgttgggcagggcagagggtcagctgaatggcagggattccaggtctcagttaatgcccacaaatttctgaactttgaacataaataccctcactgcaatacatgtttttctttctctctctttctttctctttttttttttttgaaaaacttttttggagcagcacctgcatgttgtaaaaacacaaaataaaaaaaaaataaataaaagcagaccccttggttcagatatctttgtttgtgtaaatgttttggcattctttatgaaaatcttcagattttcaagagcttaagatgacctcctctagccggctgcagcagtgtctaggtatctgtgaatgtgtaagaaattgagacagcctgcaaaatagctcacccagcttttctttaaagttccaacctttttgctggctctctttcaaactgtactgctcactttgggctgtacgttagaaccacctgagaagttctttttctttcttttttttttttgagatggagtcttcctctgtcacccaggctggagtgcagtggtgggatcttggctcactgcaacctctgtctcctggcttcacgccattctcctgcctcagccttccgagtaactaggattacaggcatccgccaccatgcttgggtaatttttgtacttttattagagacagagtttcaccatgttggccaggctggtctcgaactcctgacctgaagtgatccacccacctcagcctcccaaactgctggaatctgagaagttacgtgaaactagcgatgccctgggctaatgaaatcaggctccatggtggggaaggatgttgcggtggggttggggtggcaatgaaaggtgaaaaccactgtggtcccacctgcccatcgtcagatttcggttcctctcagagttaacgtagaaggtttctgggggcatggacctgagtcttatcccctttgcaaaagtaagaattgtatcgtagcctgactcagggttttagccaacttctctggatgctaatgctattctcttctttatacttgtcttccttcccaggcacacatccactggagctttgcagggcctatctgcccttagccctccaatatccttttcattttctttaatagttttattgatatataatgtgcctaccatataattcatctgcttaaggtgtacaattcaatggcttttagtgtattcagagtttgcatccaccatcacaatcagttttagaacattttcattaacccaagaaaatgaccccttagtcatcaccccaaatacctcctctctccagttcctggcaaccactaaccaatctacttgctgtttctatggatttacctattctgcgtacctcatataaatagagtgatatgttagtcgtctcttgtgtctggtttcttcctcttagcatcatgttttgaaagtttatccctgcgacagcatctaccagttcatcatttctttttgtggctaagtaatacgccattgtatggatataccacattttgtgtatccattcattagttcatggattttgtgtctattatgaataatgctgccatgagcatctgtgttgtccacaagtttcagcatggacttctgttttcattccaatatcctttgatgacatgtcttggcagtgatgtctatgacactgggcaagtgtcttaaaatgttgtgcatcagaaaaaagtcatcattgccaaggccagcagatctcgaaaagggggctgggatacgttggtgatttttttcatgctctacttacagtatgactcgtaactgttaatggctgagctcctccttaggtgaagaaggaaggcaatggcgttttctattctgggcctccctgcttccagcgatagcaaggagcgaaatgagatgctgtctaagaaaggaaggtgctgcgatctttgattactacacagcctcggcagtgtttgtatgattaatgagtccatgtttcagacgttcccatttaatgtatttgagccttctaacaacattgcctttcatatgttgctgactgtttttgagatttatgaggcctaactcgcaagcgatgtgtgtctggattaagagaacctgagaatctctatttatgtctgaccccaggaaattccctttaagctgcttatcagaggtgcatgctgagagcatgatgggaagatggagtcttccatccgctggtaaaatctggaatctgctctcatttcattttcactgaactgaaaataaggtaacagaccctcaggtctacctataagtaccttccaactgttccacttttgtaaatttagttcagataatacatatgctgaaattcctatatcccccccatactccagatcttcagtgtggaatttaaatataattccttattgtaaaaaaaaaaaatttttttttgatcaaggtgattttgataaactaaatgcatctttaattttactcacagcaaagcgattctttattttctctctaaaagcataattgatgtgccatgatctttgtctttgcatttttaaaactgaaagaacatttccacaccattagaaataagatttcttcttaaaaatattcacaaggtgcaaacacttacatgtgtatatgcatgatttcaccaccagggggcattgtggtttgactgtccagttaaagagcctgtgttctatcagtttacccagaaactagaaggcctgcgagtatttctgattccttccaagaaggattcatatctggaagagaacagatgtcgactctttttcctctctagcaaacagtagtgttgtcaaatttgctaaacttagccagttgaagattaacatgcaatatataatatgcatgcgactaagtgtacaataaatagtaaatcacatttttatgctttctctgaacttggaagctgcaagttatgttttttttattccctgggtgtgatgaaataaataacattcaaatacatcttaaagatgtcagtcagggggaaaaaagtgcttggcaactgtgtttgatagatttcttttatgattaattctcctattaagttttaatgacttcaaagatacaaagctagaaactacaaaactaggcatggttaataaataactgaaataccaggtgtatagaaatgcatctgtggaaaaatgaaatcatgtattctctaggatatattaggaaatggctctttggcaagtctagagggtaaagtatccctgaagggggaaaaggtttaaaaacagtaaactaaagaagattgtttttctgaaagaaattcccaggagaaaggtactttctgagattcacatatgtagattacattgttatgaaccaacatttataagcaagcttgatctctcagaatgcgtttgtctatctcagattttcaagaatcctcatacaaattgtccagggtttccacctcgcagttttcttccagggttgctatggcatggaaagtacattgctattttgttatgtaaatgctcaacagactggctcattccagaagtgggcgtcgtgatgccagtgtcttcgtaatactatctttctttcccctttagcacccagaacttatgaaatatgactcggtttatcctgaacacatctctgtgcatcggggaggatgggagaattaattccagtttctcaattgcaaaagtgaggctggtcatggggcttggaaccacgccacggacgcatgaagcctccccgtttacatgccaaatccagagcttatgcatccgtgctcagggctctctgtggtaggcaacagctggattatttactttctagaatatctcgagttcttaatctgagcagtttcgaaaccaaacccacattaattaatataaataatgactgggaaacgttgcaggactccccggaaaagaatgtataaattgatgtgtttttgtatatgcttatgtatatgcctttgtgcacgaaaggagataaatggtgtatttcacacagttccttctcctcctctaagggatattattgttcctgaatttttctgagccgccgaagcacaatagggtttagagcgttcacaccaggcagcccccactcttcagaacttcaaatctaaagatcttttaaatacacagaacttacttttgaaagctgtggcccatcccaaatgaattctaatcgtcagcctctagaatgcctggagtgagaaaacagaatattgttcttttctgtttatattatttcatactgagttaatacacttgccaagactccgaggcagcttctggcttgacaatgccttctttaactagcctagtttctagaataaagttcgggtccaccaggccctctgagtggggctcaggacactctgagatggaagagactggagaaagccaatctgtttctccctgaaaatcatcttacttttttaacgcttcgtacctagatttggcctgggcagcccagggagactgttcaagcactggatacctagactctgctgggctctagagaagtgctgggctacagcgcccagtgccctacctcttggggccagccagcctcaccaaaaaatcacgcttctggcttgctccaaactcaggaagttgctgggaagtctggctagcaacaccctcattcccagtcctggccatgcctctctgctctccctagcacagggagcatgcaggcttaaggctggaagaaaccccaagcatttggccaggaagaggcaactagttccagctggcccacatactacactttaaaaattacccagatgatctgattctgtagagagagtgggtggagaggactccagggccatggaggaagattcggcctttctctccctaatcatgagcaatgtgatttggagagagaaggacccggttggctctgcaaaccgcatttccttggctgaacgccagaggagagaaatgatccggcaagaagacacaccattccccgtcagccccttcccgacccttgcacccctggatcttctgctgagtatcggattggtctgcgtccaagagctcctcgcttggccagcaggggctgcctggagaaggggaggacaggcttcgagttttttgggtagtgacttctgtggacgtgaaaagactgcaccagaaatcggaggcagccctccaaacataacttggcctcttcgttctccctgtggacacacaggctgtgttctcctggccaagagtccaagcgtgtttttggcgcgtgctgacactctatatcgcttttgcttcggaaacgaatctggtcagtgacttagccactctataaaaatgaagagcagagctcgagtgcttataacacgtcatttttacccaagacagagaagaaaaacgaaagagagcctgagcattcctttgactccctccacccccggaaggtatattcagagtctccaagactgcctccgcccactcacatgtttatggcccggtgagaccgcatcctccctttctatatctgtcccttttctggatgcagggacacagaatcccctaagtgggaagagctttggagtggaggctgttcaaagttctgtggtgattaattattacctacccaaggtctggtcattgctatacttgagttcttttcaggctcaagatctctacctttttgtgtgtttttttttttttttttttttttttttttttttgtacagagtcttgctctgttgtccaggctgtagtgcagtggaacaatctctgtatgctccctgcaacctctggctccaggtttaagtgattctcctgcctcagcctcccaagtagctggaactacaggcacctaccaccacgcctggctaattttttgtatttttagtagagacgggatttcaccatgttggccatattggtcttgaactcctgacctcaagtgatcctcccacctcagctgcccagggtgctgggatcacaggcgtgagccaccgtgcacgacctcagggtcccttctaacctgtgctgttgtcataaaccctggaggagaagcaagatctttctagcaggagcaacatcatcccaaataaagtgatagactttgatagtgttcttctattcattcaaccaacagagaacaaatgaaaagaatcaggagtctattgaggagacagaacatgagtgatttctgtgtgctgactatatttaaagacaagattagcagtaatatataaacgtaaataagaatttttttccccagccaagaaccatagattggacttcacattcaaaatgtaaattgtgcctaggaaacatcaatgcttattttaagcaactgacccttgggataaaaataaaaagtcaaaaggaaacaaacaatgttgctgagaagtgatagaatattctagtttatatctcagtcattttacagctctggcatttctgggtaacactttagaatacttccactccggttggtccataaaaagctgcctgtgtttttatgttttgaaaatacacgcagagagacccactgcatgtcctattaggcatcttatccttgagtaagcaggcatgcaacatcagtgtcacacacatatcacccccatactcgacattctttgagaaatgccttggtcccgtctccagccagatcagcattgcacctcttggcatgcgttcttacctgttgaggatttgcttgaattataatatggtagaggaggaaacacagtcttactgtgccgtgtgctgagcgcagagccattctcagcatcctgccttgattaataaggcgtgaaagatcctccgaattcgcacctgttcagacaagcttgtccaacccatggcccccgggtcgcatgtggcccaggacagctttgaatgtggccccatacgtatttgtaaactttcttagaacatcaggatttttatgcacggaccttttatgcatggactgtggtgttttttgatttttggttgcgtgcgtgtgtgtgtgtgtgtgtgtgtgtgtgtgtgacggagtcttgctctgtcactcaggctggagtgtagtggcatgatcttagctcactgcatcctctgcctcccaggttcaagcaattctccgtgtctcaatctccctagtagttgagattacaggtgcccaccaccaagctttgctaatttttgtatttttttagtagagacagggtttcgccatgttggccgggctggtcttgaactcctgatctcaggtgatcctcctgcctcagccacccaaagtgctgggattataggcgtgagccactgcgcccggccttttttttttttttttttttttttttttttaacgctcatcagctattgttagtgttagtgtagtttatgcgtggccgaagacaattcttcctccactgtggcccagggaagctaaaagattggacacctgtaaacaaaaacaacacagccatctagctgcaagacgtagctaattgctctgcagaacagggttggccagcctggccttgatgtcggagtgttctctagacctcacacccagtccctattcttaggttttatttctcaaaccaggttttgcctgagaaattacagcaaatgattcagagcacaatgatgttgctcatttttgataagtagttgaaagctgatggtgccctccatttcaaagcaacagaagaaacgctggtggtcatggagaaagagttgggaagcagagcgtgaatgccgggatctgcagatctgagcactatgcctgcagccgatgtctctccacagggctgatctggtggctggggtgcccctggtcagaaggggtgattactgtttcctctctctccttggtctctgtcaaacctaccaactcttttcaggaatgcagatatttaattatcttctgctgttacatctgcatcatgtattggctggctgttcaaaagtatcctctctaggcaaataacgagatttcgccagcaggatctcccgttaaaggcgtgcatgtgtggctttgtagacacgtatgtgtgtgtgcgtgcacacctgcctgcccttgcacagtgggcactgtttccagtgtgcagtgaggccctcccttcgtgtagaacaggacaggacaatgacaaagttattcaattaataattgaagcttgccgggcatggtggttcacgcctgtaatcccagccctttgggaggccaaggcaggcagatcacctgaggtcagaaattcaagaccagcctggccaacatggcaaaaccctgtctctactaaaaaatacaaaagttagccgagcgtgatggccagcacctgtagtcctagctacttaggtagctgaggcaggaactcgcttgaacccgggaggcggaggctgcagtgagctgagtttgcaccactgcattccagcattggtgacagagcgagactcagtctcaaaaaaaaaaaaataatataataataataataatcgcacctcaatactccgtagccattttaccgcatgtgactattagctgtgcttttgcggttatctacgtctgttgtgtctatacggtggagtatttgcagacgctctgccagtgtgcaatgcttcccagccctgcattcagggataccaacttgggtgctgaaaagcagcgatggcaggactatttacaccacggaaacaggcaaaaactactgatcaagccttcactgttttgtttatattgtcttgacttagaaagtgattgcaatgttaataatgcagattaaattgaagcgtacagtgcctataaaccattacattatgaatagtataaaaaattgaggaagccgtgtggctcacaaattcagcactttgggaggccgaggcaggaggatcacttgagcctgggagttggaaaccagcccaggcaacatagtgagacctcatctctttaaaaaaaaaaaaaaaaagaaagaaaaattagctggcatggtggcacatgcctgtagtcccagcttctggggatgctgcagcgagccatgattgtgccactgctctctggcctgggcaacaaagagagatcctgtctccaagtctgtctgtctgtctgtctgtctgtctgtctgtctctctcggaaatattccttcagtgtattagtaaagaagttacttaggagtcacttatgcccttgaagagtgagtgatgtatcaaaatatgtctgtctttattgtttcactttcatccttctttttttggagatggagtcttgctctgttgaccatgctagaggtggcgcgatctccactcaccgcaagctccgcctcctgagttcaactgattctcctgcctccgcttcccaagtacctgggattatagacacccaccaccatgcacagctaatttttgtatttttagtagagatggagtttcacccttttgattggttggccagtatggtctcaaactcctgacctcaagtgatccacctgcctcacctcccaaagtgctgggattacagtcgtgagccaccgtgccggccactttcatctttctgattaactgaaaagtatcaagcaatacttacatgtaactgcactttctcatcaactgcaaccataatttagctatggatacaagagttgggcacaaatccatgaaagcattgagtgagaatcaattggctctgtgggatttacaataaagaatgttgtttatttttatttgtaaattgtgtgctacagatccttcgtatcagtaaaatgtatgataaacatatgtgtgtatattcacacacaccctttcattttggcaggagtgtttgttaaacatttaccacagcagtggattcacttccatcagctgctaactttcaaggatgtttgaggatgcatgacctgtgcaatgcacctgcttcggtgcctggcacagagtcgcaaagccacaaagatggtgcttgttggttgtatgtgttgtttccatctgatatcaccattgaggggagcaagatgacatgtgcctaccccacgtgtccagcagcaaagccacctggcatagtgggctgctcagcgtgcctggttcatactgcgtgtttatagtcccagggtgttttcagagagcaaaagtcctttatgattagcaaattgcaggtcctcccctttctgatatttacagcccttgcaaccgcctgtacaaaaatcgggaaaaggcagaagacggctgtcattaatgtaaaagcagctggttacctccccctccccagcgcacacatcacctcctagtacaattagtcaccatgtcttttcccttccgtcaagccttttagcggagttcacagggatgccttcggtccagacactatgaccgttgacgaaggatttgaaatattttgagaactctgaaataatgcacaccagaaacgtccagctgaaaacaaaaagggaacaagatgacattttgcaatcccatgcacgttgcaggcacgttgaatgtgaaggtcagtagtacttcagagggcaggcctgttgcccccaagcctgttgcctaagaaatgcccaggccctttgaacaaaatggattcgagtgattacagcacgtcctcacttacatctcccaatatatttcttgttattctcgttgagtactgcattcagacagaggttgccaataaagtttattgtaggagctaagtgtcaatatctgtagtaccccccgcctagggtgctgctaataaaatgccacagatagtctgggagaggcatgaaaatttgatggcaaattgatttcaggttcatcttgaaatttgtcctcagctggactcgatacttctggcagacatgggatggcttttgtcagaagggtctgctggaatgagacagagatgtcttgatctgaatattaaatacaacatgctgtttatgacattatccgtttactgctaaaatacccagctacttctgtttacacattcttctgcgttgaatgggtaagatagcatctcatagatccactttacatatgaaaagaagttgtatcaaacttgctgggcatcagaaataaagggttttagagacactggcttcaaacacaagttattccatccaagattctaaacttagcaatgcaacttgcacttaattttaaaacgctggaaaaataatgataaagattgtgtgatcaagtatagcagccctgtggtgtttcctcagaatggtgtattacagaaaaggaaaaagccatatacatggagaagaaactcccgatatttaatattatcaattgctggttcctgtaaatttgcatttatggatcacattataaaagcaattactcttatggattgttcatgcagaaatgcactatgatgataatatacttttaaaagtatatttatttccagaattcaatttgtaagaggtttgagggaaaaataatactgagttttgagtgtttctgattttaaaaatgtgttgagtagaattaaacgtgttcaccaaaacccattttatcactttaaattattgggcaattaattgtatttacttagcattgaatgcatgattagaaatggaatttttaaaaaagcaatactcaagtggagtgagttcatttgttcattcagcaaataggacttgagtcccctactatgtgcggagccttaaaggatgagaaagatttctgggtgggacttcaatgagactcatttcgcaggttttcatgttattatgtatatgtggtaaataattaattttttcacaagtacttgcactagtgatgctaaaataagcttgactggcttgtaaatcaatgaaggttactgttgcattgctttgaaattgaatttaaaaacagaaacagagcagtccctttgcttccgaatgcagccctcccattggaatcactttggaagaatctggatctgcgtgttacccagtcttacttttcaggcagtcccaggcaggaaggcccattagtgaaaagagccctgcatatgctgtgggtcatcacagctgctgctttgcacatttaggagatatttgtggacctttcattaggacaatttttatggcccgagattaaaagttaaagttaagtagtaaacgtaatgaacatgtgcctttggagattccaactggtttgtattttcattctctccgttggtcatggcccattgaattttgatgatagcattaaaacaaatgcctcaaatcatttttggaaggagacaggatatgaattgacaaattaataaaataaattatacttcaaagatgctaaattatctcttctatgtaagtaggaggctctcttttcagatgtggaatttgtaggagcttgaatattctcaagagagggtatgggcaacatttgataaaagatgtaattattgggtcgtaggaaataatgattgagatagggtatccactgccctggtgggggaatcagtgaggctaggaatcactggaaaatgacattccttgagactccttcaatgggtagagtttgctttagcttttcatgtatcttactgtatgatggttgcttttgggttgaattccaccttgggttcaattcaacatgaaagttaaccttttggtgaaggaatgatccaggggaaatagtaaaatattagcctgtcctccaatacaaattgcctgtgagtcccactgatacttacaaatatacagaggtggtgtaaaaggattctgtgtcaaaactattaatatttgagaaatacaatacttatcagagcctttgtatgtaaatgtctcatatacccctctaagaaggggagcgaatagtattttccaaacttacgtcaccacttaccatccacctgcatactttacacgtcttggaatcaaccttacagggaacacttggtcgaaaaacagtgttttctaaatttatattacagttcccactccccccccccccacttgtatcactttgtatgacagtcttcttgggaacatccattgggaaactcttcccttgcaggtgtctgttacaagtcctggttcacacagtgttgcgaaagaatagttgtatgtcacaattttctttatatagtatttattgagaaacctattctgttaatagaatgactcaaaatcagccaaccccataaatactgctcaagcatttagaaagactttctctatagaggcttcagacgtcagaaaaaaacttagagagtgactttcagatacagcaacctagtctatgttatagaacattctaaaaagagcagattttaatatctttcctcccacacttgctttgactccctcctttagtaattagataattatgtataataagcacattaattatgtgcaacagctgccattgagtgtgtgcatgtacaactgcttgaaaacagcttgtgagttcactattaggtccatgaaatttttctccttggcaggttttcactattagtttgcttgacaaaggatagatacattttccatgtgtggaggtaaaagcagtgcagtgagctaaaaagttagcaaaggtgaagtggtcctaatctgcggccctggtacacttagataggcatcattgcctttcctctgagctcttggtgctgataacagcttccttgaccgataagtgtaccagatttccttacctgtcccagggcaagatagcaagagtttcttgatgcatttaaaaaatgcatttagtgttggcaaaaggctggcaatttattattaagtggaataagcagtttaaaaacagtatgtacagggtggttttctggctatataaacacacaggcattgaaaatagatatacataaataatgttactataatttgtctgcctcccttctctcagaaaagaccaatgaattatctattatgtgccactcactatttgagtgctgggaatacagccccataaagtgaagtttcatatatcaggtagcaagatggccatggtctgtgttttgagaatcacaggcgtttttgaggctcatggctataatcccagcacttggggaggccgaggcaggtggatcacctgaagtcaggacatcaagaccagtctggccagtgtggcaaaaccccacctctactaaaaatacaaaaaaaaattagctgaacctggtggttcacgcctgtaattgcagctactcaggaggctgaggcaggagaatcacttgaacccgggaggcggaggttacagtgaaccgagatcgtgtcactgcactccagcctaggcgacagagcgagaccctgtctcagaaacagaaaataaaacaaacaaaaaaatactattccatagctgactattttctgaaatgattttgttacttttctaatgagaaaaaaatagatctcgtgtgtggagggaattgaagatgtaatttcagactctgcgtacagctaagctcatcgtagttacttaactaacacttaaggaattaaatggcatatctgtgtttgagaggcacactgagatgagacaccagctctttttatttatttctaatggtttgcttggtgtactggtcatttccccggaagtgtgcaagaagaggtaggtgacttgcatgttgtctatgaacgtttttagaaacgtctggtggaaccatccgggcatcacatagctatctctgtgcagagccaggccggatgcctaggtgagatggaaagcttccgtcagctttcttgccggcctctcctcgcagccgctcccttccacacctgccttttcacctgccagactgcgcgttgcccgttgccctaggtctgcgtgttcagcacttctgcaacagtttcttctgcaaaggtaacttagcggagggtacagggtcttcttccaataagtcagcaccttcagttaaaaaaagcaataacattctccaatcttggcagtctggcaaggtagaaagacacctgaaggtgaacatctttggcccatgtgaaattttgttacgtgttgttaggtttcatttgtctctcagtcaatcagtcaatcaatcagtctctctccttccatccccccttgtcccccttttctcttctctccccttccctgctccctctctttaaggttttctcacagattaagagagtagcatgtgctcatcccaattattgaaaccgtgcaaatgaatagcaagaaaaatagttcttggcgtgcccctttctttccgcagtgcccaggccagaagtacctgctgcccaagaccacagctgacagcgccccgggagtccttcacactcttctctgagctcttccatccttaaacagacatctatgccaaatgcagggagggtttgctgttggcttttacaagaacactgtcctgttatgcctgctgctctttgcttggttttccctggacggtcacaaacatacctccaggtcaacagttaaagagagaacccacttcttctaatagttgtgtaatattccatactacagatattctgttatttatggtagctagatttctattcatttttaattcccatgctcagagctttccagacatttggaaacattttagaaaattgacatcatctcttcaaatatctgaactcagatttcctctgtgatgttggaatctttaaaatatcatgcatacttggcctgtttctacaattttgttccccagccatcgttctccattttgcacgtgtattgtctcctcctattcctctgtacccttcacacgtgcctgcagggtatatacttttgcacaggcaaaagtccagctgaaatgatccttacttagcataatttaaacgcgagggtttcctaatgctccttccatttaaataattcaaaaatccgtggcaaggtacctgaaaactactaagagaagagaggtgttaatggacacatcattgaggctgaagccaaactgtgtgattctgtctgcagttgagaactgtaagaaaaagatcaagattaacattattattattggtgttacctcatgtctgtacctttttggagacttgggtctgtttcccgagaaatcatttttcctcctccttgaaaatagtgaatttcaagtggttttaattttaactgcattatttgtttgctttatatagtttttaaagttttatgaaaaagtcttccatgtgttttttatttatgaaatcggggcagccatccttcaaatatgaagcaggtatctgagaatactaaaatcttacagtgcattttataggagtgtgaatgatttttctgcaattgacatatcaaggagcttatcatctattattaagttaccttttcctgaaacaaaatatttgtcagatgtaacttggtacccaaatgccttttcttgctaaactaggaactgtcacacacacccacccacccacccctttattcttggttctctcctatattttgacatttgaagcatccacagaaaagtaatagaatgagcaattgaaaatcaccagaactgaaattatttccagctatgtttaaatatgaatgtcttgttcgacgcttcgcatatgtatttatggctgtgtgatatcattatggcatcctaatgaatgtctactgaattatgtgggattcaacaggggatacaaatggatttgaattctgtaactgtcatattgtggtccggagagggtggaaactgaagtatccctctgcgtcgccacatctgtcaaaagtcctcagcgctccccgcaatccatgtctggtggaagcgcgaggtggtgaggatggaaagggcatgcgttgacttcatgttgggacgggtcttaaactaaacacatgtcacgttatggagctgtttaccttggctttgaggtttatttccttctggattaagagtgatgtcgttttatataacaagaagtgaaaaaaaaaaagaatgatgttacacaacctattttttttttttttttttttttttactctgaatgtgtaactttaaatgaagaaccaggacacctcatcctttagtcttttctttactagtgagtggcagatatgtgtggaccacagagatggactgaaaagagaagtaacagtccttggtttgtattccagcccccaccttcctatgtctttgagcttggtaattagatgcttggagcttcagtttccccatctgttggatcagaacggcagtatgtgctctccagtattttcataagagtcacatgaaatatgtacctacagagtctatcactgtgctttttaagttggggcttaatatgtggtagttgttgctgtttttgttattattattattaatgttattttttgtttgtttgttttttgagatggagtcttgctctgtcacccaggctgaagtgcagtggcgtgatctcaactcaccgcagcctccgcctcctgggatcaagtgattctcctgcctcagcctcccgagtagctgggactataggcacctggctaatttttgtattttatattagagatgggatttcaccatgttggccaggttggtcgtgaactcctgacctcaagtgatctgtccgcctcggcctcccaaattgctgggattacagacgtgagtgaccacgcctggcccataaatgttatctttatataacatactcacagctcccttaggagtacttttgtccatttctacacaatggaaacttataattttagccttagcaacatgtatttactgggcatctagatttcatttatttaagaactttttattgaatgccgattgttcagcagccaccatgcaaggtcctggggaaccagtgggcagccacacagagaaggtcccaatggcaccagaacaaggccagcttcctaggaggtgtctggcttcaagacagggatttcctttagctgggtggtagagaaatggattgcctgtgatttcactgtgcataaaatgacctttcagcccttaacctgcgacatccacatgtgttctttggtactcacgggtgttatggttcatagctgtggtcttctgaagtataggaaaaggcagcttacagaaaaaaacttgcttgtttactgtcttctgagctgatttctcacctactggcaagtggataggtctagtttttgtttagctgtttttctaatttaatcttatacatgagacagctatagatggatgtatagtctttgaagtggggccagttggctccgtctattagctgtgtggcttttgtgcaggtgacttgtggcccccggcctcagggatctcatctctaaaacgaggctcttgatgttacctgccttacccagctgtgaagattaaaagggttttgtgtgttaaaggacttgcggagtgcctagaacccaatgagggccacagagcttgctccgattgctttcctgaaggcagtaagcatgttgctctggtaatagtcatcttcacggccatcattttgatcacattttggcttagtttcttcctctaccctcttcccacgtcagacctttccatggaaggtaaaacatgttaacagtctaatgtgtttccttctaatttttttcttcatttatattatacatctatgaaatatatatatatatattacatatggatatatagacatacacagatgcatatttagggtgtgctatggttagaaagtttgcatccccccaaaattcacaggttaaaatcctaatcctcaaggtcgtgacggtactacaaagcaggacctttaggacatgataaggtcctgggggcggagggtactaatccccatgaatgggtttagtgcctttataaaacagacccaagagagaccgttatccattttaccatgtgaggagcccacaagcaggtgccatctatgagccagagtggacccttacccaacaccacatctactggcccctttatcttgaacttccagcccccagaactgtgagaaataaatttgttactcataagccacctaagttatactattttgggatcgcagcgtgaatggactaaaggtttttgagattcttttttcagtagtttcacctaataaaacatggaatcattctacgcatgctgttctgtattgtagtatggttttccacactgagaacatactgtgaccatgcagtcatttcccagatggaacttattgagggacattcacttagtttcgaaaggtttctccctccactcccatcccggccacagatagtgatgcaataacatccttgttcgcatgtccagtctgaagcttttattcctatgggatgagttcccaggcataggattgccaggctggactctaaattttgaaaatggatttttatcattctgatggattacggtgaagagagccaaagtcttgatagaaacactcaacgcagtgaattttttagatgtaaaagtggatggtacttaaggatacgcacattagaaggagtaatttgaccagcccatcacagtattaattgattttcatgtctcgaagacttctgatttcgttttcgaggctggaaaggcaggtggaaagcccatcagttttacacacatattttgcagacaagtattagaaagtaactagcctgcttttactaatggttctgtggaagaaacacagcttgaataaatgtcgtcttggatgctcagcacagattggcagtggatgtcaggattgtctggtgggaaggctgctgggactcactctagactgggagtggggtggggtggggcagggcaggacggccctggctgattaataatgtttgttatgaagtctagggtacgtggggagagcttcatgaatccctgcattggccacccctgtaccacggccaatgattcaccctccctaaatcccagggccagatattagaacatctgtgatgaggactgattttctgttcgtggcctctggaagtccagtttttctgagctcaggggagccttggttgtatcttataggcaagagacgaatttacattttgccatggtgttaacaagcaaaagaagacaaaagagctcaaaatagacagtggcgtgctggggtcaggggtgctggtcaccagggcgagcagttatgggtgaagggctgaatttgcagggtcaaggagattgcctccaggccccttctggaaacacactccctgagccttgtagaattgagttgattctgtttaactgcccagtgaagaaatgacttccttgctttaaaacatttgacagctgtcttatataacttaattcttcattccagtggcttttggagcagcctcaaaagtcattttatcttcttggctctttgatattatttgtagtaatttatttaaagtaattagagacgggatcttgctgtgttgcccaggctggtctctaactcctggcctcaagtgatcctcccacctcagcctcccaaagtgctggaaataaggtatgagccaccaagcctagccttgatattattttttaatgggggtgtgtgggtgggtggtgatggggatattccagcagaatatcagaaacagagatgaggaaggcagagagagctcaaagacaaggctcaagttcatattccaacgccagtacctgccacctgtgtgaagctgggctaattatgtgtttaggtttcctccttcgttaaatagagttctacttatattacagggttgtcatgcaagttgatgaattaaatacgctaatatatataaattctgagtaagtattaaccaaagaaatggaacatcaatattggttcccagtctagttcacaggtgttatcaagatggttacctttctaagtgtctttttatttcactagttccaaaagagtatctctcaaaatattaggtagtatttagtcaacactttaacacataacttgtttttttttttggcataagaagcccatgtgaaaacacagttgaccctaagcctatgaaaaatgacttgtgtgtgggactggggtggctcataggagaaggaggatattcgtctggatttttactggtatgtatatatttttgggtactggagatggggacagtgagtatttgaagctcacagcaggcccattttgcaagttttcaggaaactgaaattcagagagattaagtattttgccatgaatcactttgtagtaagtgggagagctgttgcaaacccacgtctgtctacatccacagcctgtgctcttttcatatacaagggaatatggaggagaagggaagtgatggaaggctttaaaaaaaaaaaaaaaaaacttcagaagctgatttgagatttattcatctttggtgtactttctttactaaggcaggttgtagactcatgaaacctagaaggagttgaaaaataagggttaggattaaaaaaaaaaactagtgaaatcaagacaccattttgcttaattgaaggcttgcggaacattaaagcacaacaaaaacctaattctttgagtgtttctgaggccaagccttttcccacaaggcactgtgtacacggttctggaagctctcctctgtttgcacagtagtcactcatcctgctctcgggctctgcctgcagtctcttcctctgtctccgatgtcactcttctctgtcttcttcagaagctgtcatatgacctccagatttctctttgactccctgtattaccattagaagacatctacactgggaaattgctcagttcctgtttttgattaatattttatcagccgcaagaggaaatggtattctatagcaacactaataagtaattgagcagatgagatgctcttgctagctttggtaaaaagtcggggcaaggttacaacagaggagctctgatgagacttgggatgataaagtcaagtcgaatatctggtagggttaaaaatctaacagtgggccaggcgcagtggctcacgcctgtaatcacggcactttgggaggccaaggcaggtggatcactcgaggtcaggagtttgagaccagcctggccaacatggtaaaatcccgtctccactaaaaatacaaaaattagccaggcatggtggcatgtgcctgtaatcccagctacctgggaggctgaggcaggagaattgtttgaagctgggaggcggaggttgcagtgagctgagatcgtgccactgccctccagtctgggtgacagagtgaaacccatcccccaaaaaaataaataaataaaaattaaaaaacctaacactggtacgagaagaaattatgctctaaatccttctttgagcagtggcttacagacctaaatttatcaaaggtggtggcagtaatagtaataattaccatcttcatttaaaggcacgtatctaaaccaaaggacctaaataaaatattaatttttcatagtgtttaatatgtgccagtatatataaattcaaggtaaggtagacagctgtaaactggatcccctgctgtacccagcaaatgctgagagccctgcttcccctcttgtattcaaatggctctataagagaggaagtagtacagctatcagtaacaatgccatccggtaattaccgaatcataaatgtttggggagctgaaggtcacgggcttagtagcaattctagtctgatgtttgattccttgtgaattttaaatgcttgtactctctatctgggtgatggtgttttagttgccagtggacagtctgatggaggtgggggaagagttattcttccatatttatttttctccaccttgggtgaaaaaacttcgcttttcgtaatgtggtacagtgtgtgcttctgtaaatggaaatggtttcagcacatcacagtcatgcttccctgttgaaagatgctccgttttcccgcatacatgatgtccagcacaacgtctgatttatgagagcatgaccctgggggcctctggaacagctgctcacacactccctttaggaggcccaggctctcaggggaggcccatagtgcagctaggagctagagttttaggatgaagaaattacaggtaagaacacagccccattttaagaaataccagtgatttctgtttttccttgttcttctttccctcagtattttattaacatgtgctactatacaaatacacaattcacttaggactctgtttcgtgtggatcacatgggagctttcattaaattgtggtgattccaatgtgagtggttatcaagtcaacatcaaataacatgaagtgtgttttagtcggcaaacatcactttgtaattctctgatgtgtttgggttgattcccttctttctgctctttttctctttataaagtaaacatttttattgcaaaggtactgctattgttagtttctaaaggcacttgtcatggtgtgactaatattagaagcagacacagccatgatgagcaatactctttttttgtttatttttgttgttactgctgtaagccactttcttctccctctccattaaaatgcaacttaattggtaaagtttagttgactagagatttcatttatttatttatttatttgtttatttatttatttatttatttgtttgtttgagatgagtcttgctcttttgcccaagctggagtgcagtggcatgatctcggctcactgcagcctctgcctcccgtgtccaagtgattcttctacctcagcctcccgagtagctgggattacagttgtgcaccaccaggctctgctaatttttatatttttagtaaagacggggtttcaccatgttggccaaactggtctcaaactcctgacctcgtgatccacccgcctcagcctcccaaagtacttggattaaaggtgtgagccaccgcgcccagcctgtatttatctttttaagtaacaaagtattagcattgtgataaataatatttaatatatagtaagggaggtcaaagtatgaactattttgattttttatgggttttttttttttttttaaagaatgcgttgattttgtttttctttcttttttttttttttttttgaggcaggccttaggtctggcacccaggctggagtgcagtgacgtgatcaaggctcactgcagcttccacctcctgggctcaagcaatcttcgtgtttcagcctcctgagtagctggaattacgggctcatgccaccacacttggctacttgtttaattttttgcagacatagggcctcactatgttgcccaaactggcctcaaattcctagcttcaagcggtcctcctgccttggtctctccaagtgctgggattataggcatgagccactatgcccagccaaattttgtttttcttttctttttttttttttttttttgaaatggagtcttgccctgtcccccaggctggtgtgcagtggcatgatctcggctcactgcaagctctgcctcctaggctcatgccattgtcctccctcagcctcctgagtagctgggactgcaggcgccagccaccacgcccggctaattttttatatttttagtagagacggggtttcaccatgctaaccaggatggtctcgatctcctgacctcgtgatccaccagccttggcctcccaaagtgctgggattacaggcattagccaccacacccggcccagattttcttataaagtcaaatgggagatacttgtttgcaggaaatagttcttttggttcttacttttccataaggattgagtctcaaaatgtctggtagcatccactgcattttgtaggggacaataacaaagaagatgccagcaatatcttctatcttttccaacattattcacctctcccacccaaggacaatggtgggctggacagagcattcaatgaccgagaatctaccataagctactagggccacatcttcccctttcttctcccccaggtttgtcccatttgtactgactctgacccaggttgtcatgacttgagactcactagaagtttcagaaagatgcacactgctttaaaaaaaaaaaaaaaaagggcaaggggaggtgtgagaagaaagtataattctttttcttctaacgggagatataaaaatcatataagcatgatttatcatttgattggaacattgtattttatggttgcagagcacatgtatcatcctatctgcttctgacacccagtaagcagctctggcttttataattttgatgaaagaggtttcctaacagtatttcggtgtgcatgctcacacaccagccctggtcatcagtgaacagattcttccaggtcttcattgtagcggaagaaagtgagatcagagatcccgaggaagggcttcagtttcaccagtagtggagctagggagtagcggggcagaagccgcaggaagtcagtgcaggacgccggaggccactcctaattgcttcatgtgttgttgccgtgctgatgaccttggaggcgctgctggtcctggatccttgcgaccttttcttccaagaggaaatgtggtgctgagccccccttccactggctgtgacaaagaaggacccctcatgtgggggcctaattctagtgaatccccaaaggtacatgttgaaatagggaaaaggcccaggtgaggctgtctatgtaatagagaagatccattgcaaaatgaaaatatggggttctagccaggggcagggaacttaatctcccttttccatgggcccaacacctgaatctagggcaaacaggtgtcccccagattggatcctctgctctaggacacattcttgtcctagagcgggttgggcaagaggcttttctctcagtcaccagccccaaaccctgtggtcttgccagcccaggacgtgtcaagactgcagcctttgctgacctgtgaccatctccaagtccatgcccaggcccctactaggagttgagggcaacaggggcagtgggtctctcctgcttaggaaatttgggttgagggtggcagtgatcttgaggggggtctgggagggaggagccagcctggcctggtctggcctggcccagtgtgccagcgagggcaggtgcaatggctcacgcctataatcccagcactttgggaggccgaggcaggtggatcacctgaggtcaggagttcaagaccagcctgaccaacatggtgaaaccccatctctactaacaatacaaaattagctgggtgtggtgatgcacacctgtaatccctgctacacaggaagctgaggcaggagaatcgcttgaacccaggaggtgaggttgtggtgagccgagatcatgccattgcactccagcctgggcaaaaagagcggggtaaaaaaacaacaaaaaaatgatgtaggaatgaacagatgaacaaccccacacaacctaaggacgactttgaatcaattcttctaagctggtagcagaagccacctttccatttgacttgtatctcgctctttttttctttcttttttttttttttggagacagagtctcactctgttgcctagactagagtgcagtggtatgatctcagctcactgccacctctgcctcctgtaatcaagagattttcctgccttgggcccctgagtagctgggactataggcatccaccatcacacctggctaatttttgtattttttgtagaggtggagtttcgccatgttggccaggctggtcttgaattcctgacttcaagtgatgagactgcctcagccagccaaagtgctgggattacaggcatgagccatcgcgcccagccagacttgtatctcttaatgagtttaactacatttaaccatgtatgtgtcagtcctactatgcaccttacagctcactaaccctgtttaataatgtatgttgttacatttaatctttatggtagcctcatgaacaggttcttgatcaggagtgatattgcctgccagggaatgcatgtcaatatctggagacatctggggttgtcagttcaggagggtagaggataggggggaaaaggtgctactggcatctagtgggcaaaggccagggatagtgctaaggatcctgcagtgcaaaggaccatgcccaccacaaaatatcagcagtgcccaggttgggaagctctgtgccattgtgcaaagattcaaggtggctatgtcacaggactggtacatgtcctttttttttttttttttttttttttgagacggagtcttgctctgtcgcccaggctggagtgcagtggcgtaatctcggctcactgcaagttctgcctcctgggttcgtgccattctcctgcctcagcctcccgagtagctgggactacaggtgcccgccaccacacctggctaattttttttttttttttttttttgcatttttagtcgagacagggtttcaccgtgttagccaggatggtctcggtctgctgatctcgtaatccgcccacctcggcctcacaaagtgctgggattacagacatgagccaccacacccgccctacatgggtattctaacccagtctagtgatagtccaacctcctgtactatgagtaattagcaaagaattaacagcagaagatcgctctcaccaaagcccatccagaaagtggctcgtattcaaggtgctaattagggtgttttgttgccagtaaaaacatgagtcagatttcatgattgattcatgatgactttaaaattaatgctgctgttatcatacaaagtagtggtaagtggaggtaagagaatgtttttgctttggggtactaagtcatcgttataataaacacacagtaaacccatttatctcaggcttaatgctttcttgtttcttctaagcacttcttaggtgcctctgggctttttaacattctttggcagttgtaatttattaattgatttttaaatttggccggtgaaaatgaactttaggtaggggtttgaggaaaatgaaaaggcctatttgtttttcagtggctggttcttcgtgttcagcattaaggattggtagaaatcaggcaacctctatgtaacctcagccatcttggattcccagcttactcacatcatagatggagagtcagttgtttagaaaaaaactttcttttttttttctttcctttttcttttcttttctttctttctttcttttttttttttagggagggtctggctgtattgcccaggccggagtacagtggcacgatcttggcttactatagccttgacctctctggctccagtgatcctcccacctcagcctcctgagtcactgggactacaggtgcacactaccatgcccagctaagtttgttcattttttgtagatacagggtctgactgtattgcccaggctggtcttgaactcctggcctcaaaggatcctcccacctcagcctcccaaaatgccgagattatgggtatgagctactgtacccgaccaagaactttctattatatagattttaattaaaaacagtcctgttgagtggcctctttatcaaatgcattctcacataacctcatagaagtgagccctcttactgaattatgtggctggggttcttgggtatgttttgttctattttctggttggtggttttctttctgtcgggtcccgtgggctctttctggacctcttctcagaatgtttttcgttttttttattttttgagatggagtcttgcactgtgtcctgggctggaatgcaatggcaagatccctgctcactgcaacctccgcctctcgagttcaagcgattcttctgcctcagcctcctgagtagctgggattacaggtgcatgccatcacacctggcaattttttttttatttttagtagagatggggtttcaccgtgttaggcaggatggtctcgatctcctgacctcgtgatccacccacctcggcctcccaaagtgctgggattataggtgtgagccaccatgcccagccctcagagtgttttaaaatgcatactattaaatacctaggattataaagggagccagctatacttacatatagttctctctgtgaccctgtagaatgcactgaagcaaaaataacaggtaatgctaatcataaagttttacaaatctcctgaagagtcttgttggtttccgtgttgatgaagcaggaaatttccctgacccctttgcaggcaggaagtggagtgcggatgctggaactagctggctgctttggtgccagtagaggtgaactgcactcacttgaaccccctgcactccaccccttctgggaggaagcatgcaggtgagcaggtgcaggagccagggtaaatgcttttgggcactggcaggaatgaactctgtactggccctgggatagcatctggcaggggatgcccgtgacccctgaaaccctaaaaggagtgttacagtcagtgctcttttagttttgccatccacggacggcttaagtgttaacagttcagtggagggtcagcgtgacagccttttgcacccacatctgggttcttgtccagtgtccaggaggaacgaggtctcatgagcaaattttaaggatggcagatgtgggggattttattgctgatgaaagtggctttcactgggaagataagctaaaaagaagacaaagcaggaaggtaattttcccctggagctatgccatcaagctgttcttctgaagtccagccgcttctctccaactgtggtctctaatttccagctgcttctcctcttttcttcaatgtgccagcggagcctggggtttttatgggtacaggattgggggcaggccgggccatgggtggttgtggaaaaggcaatatttgagtggaaaaacagggatatatgttctcactttgggccacagttccaggcttgaggatggggccctcaccacggacctgccctcttctgcccagaatttccctgcctcctgtccctatcattgatacctgcaattctttgtacatatgaaatttaatatggtgagattggcatctagctgctgctagagatagtgctcataataatttttaacattgattgagtgtggataataatccaggagctgtgctaaacgttttacaacacattatctcacttaatttcacaactccataaagtagttttcacttagttgagggatgaaaaaagttaggctctgagaattgatattactctgcaaatatggaattggaatttcaaagcaatctatggtctttatcacttctccattaactgtccttgttttattaatgctgattactttttgatttggtttggttctttggagttgtttgcatttcatgagtcttggcatctttttggtagagaaccttgctaggttctcacaatgtagaaattaagcagaaaacagaggtctcaatttgccttttcagcgtgaatgcagactcttacattcagtgctgggagtctttcttgagggacagtgagagcgaggaagggtttccattctccgagatggatggttgcattagtatttatttcctttttgtttttccttaggatgagaaagaaggcagtggagcccttttccttaggttagaatggttctgttggttgaattgtgcaccctgtttggttgaaacaattggacagtaaggatgtgactattattgttgctctctaatactttattatgtcataccaaaaattatcttttgtattttgctaccagttcttttagtttctcttacatgtatgaagttggatagttagaatgagatgaaaataaatgggctgggcgtggtggctcatgactgtaatcccagcactttgggagtctgaggcaggtgaatcacttgaggtcaggagttcgagactagcctggccaacatggtgaaaccctgtctctactaaaaatacaaaaatttttttgtattttgggattcggtttaggtgatgtgtgtctgtaatcccagctacttgggaggctgagacaggagaatcacttgaactccagaggcagaggttgtagtgagccaaacttgcacaactgaactccagcctgggcgacagaggaagactctgtctcaaaataaacaaacaaataaataaataaaaattgtttaaacctgccaactacaataactttttcagtctctttctccctttcccaccttcccaaaagggtgggaaatttttaaagtaaagtaataaacaaataagttttgggttgggcgggagattagttagagacaggatctgtaggtcagaagtggtatttgggggagtagggagttttttttttttttctttttcccttatgcatttgggagtggaagagctgtcagattctgaatttagttagatttataatgctagagacattcagcagtctgcctttccctttctgttataaaatcatgtttttattgaattacattttaatattggtatcactttaaaatgaaaatgagtacttgcaaaatgtatttttgaaggagttgggtggtggtggggggatgccattttggcaacagatgacttcggttcaagtcctctctctgtctcttacttgctttgtggctttagaccagccacccactcagagccttgaaatcctcatctttgaaatgaccatagtaagttcctgcctaggctctcccctgaagctgaaatgcatgaacatgctttgtaattttttttaaggattgatactagctagggtgttgataagaaacagcaggcatagttactgggtgattgagaagagtttaacaaaagactgtattagtctgttttcatgctactgataaaggcatacccaatactaggtcatttacaaaagaaaaaggtttattggacttacagttccttgtggctggggaggcgacacagtgatggcagaaggtgaaaggcacatctcacatggcagcaggcaagaaagaacttgtgtagggaaactctcccttatgataccgtcagattccttgagacttatttgctattgtgagaacaccttgggaaagacctgcctccatgattcagttacctcccacctggtccctcctgcaacatgtgggaattcaagaagagatttgggtgggtacacagccaaaccatatcaaaaaccatttataaaactctaagcagccttaaaggaaaccaccaagggaccaaggcctgatgaagcaagagtaggagggaacagatgcttggatagggcaggtgagtcacaggctgatgggagctgccaccgtcagtagaggtcctgatgacctgggagggtgggagccagacagatgggagtatcctagcctcagttcctttccatcctcagaactcctcccagtgcctctcaatggctaaaccaaccaaaggttggagctcaaggaagctcctgaggctatctttacaggtcagccagttgggaacagagttgacggagaggggacaggaggtgactagatttggaaggaaaattagaaaacttttggccgggcatggtggctcatgcctgtaatcccagcacttttgggtcagttgagtctaacataggggtgtccaaacttttggcttccctgggccacattggaagaaaaagaattgtctttggctgcacataatatacaattgttgatgagctaaaaaaaaaaaaaatccccaaaaaatctcataatgttttaagaaagtttatgaatttgtgttgggccagattcaaagttgtcctgggccgcatgtggcccaccagctatggtttggacaagcttagtctacaggttcttcaagaggggcttgagcatttgaaagacttctagtgggagagatcacaaggtacaactagaaaatcctgggctggcctgagaggcagacctgtgattattttgctctttgaaagttgtccttctgcacccattttccccagacctaacctcgatttgtgctccaggtctgagcagaaatgttattccctccagaaagccttccctggatgttgagggatgaagttgtaggcccctcccgaatgcgtcctcagaactcgctggttctcgtcctcgccctcagcatacttgctcattgtttgtttccatctctatcatctctgtgagccctttgaggatggatgtgtgtccatcttgttaacagttggctccccagtaaccagtacagtgccagatacagagtagtaaccctacattctagcgtaggcaaatattctagtatttgccaaaactagaggatgaatgagtgatgggtaagagagttctcagaaaaatggatataaacaatattgtaaatcatatttggaaaataaatattagaatcattgaatccctgagttatagaaaaatttattaatagcgctatctggctactttttaaagtgtggacatcctcgatgtattagctatgcatctgtggataggaggcttacccactctgagtcttgtcaaataccaaacacaggaaaacaatatcttcctgagaatgttgtgaagaatatatcatccagtcagagtgaatcagcttgcccagtgcttggcatatagctgctcaagaaatattaggcattctttgttattataaatcccctttgtattttaaaatcctcatgtatcactgaaacaaccaactgaaaaccattgagaggctcatggtgaaagaagacagacagtgtaatttccctggaaactcaattttgattcagacgtccacagcatctcatttctgcctttaaaaaatttcaagagtgacattttggcatgactggactcacaggtggagaaggtatgacaaacattctggaaatcttggaaggtgaaatatagggaagatggcccctatggaggttcattgtcccccaccttattctaaataatgactttcttaaaactacatgttttgggggaatgtcctgcaatattgctttacatctttttatttttttatttcattttattttttttgagacagagtctctgtctccaggctggagtgcagtggcacaatctcagctcactgcaacctccacctcccgggttcaagcgattccactgccctgatcagcttcctgagtagctgggactacaggtgcgcgctatcatgcctggctaattttttgtattttagtagagactgggttccaccatggtggccgggatggtctcgatgtccttacctcatgatctgttcgtctcagcctcccaaagtgctgggatgacaggcatgagccaccgcacgcagcgtattgctttatattttaagactatacactgatatccccgagcacccaagttcctgtccgctggtagaattcacaaagctggttttatgtctccttctcttcctcttccagtgttgtcttttccctgcattgagatagcattgcatggagatccttgtactcttcgaacagaggctgcagatggacacaggatctgctcagggagataagatcacctgctaattctgctttctccatcagagtctgaatgatcagtgatggggaccagagctaggttaggtctctggaaacgccctctgtctgagtccgggagatggatgatatgggtaatgacttgctgctttatcttctctccatctccttacagcagctccaactactgacttttattgtgtggcagctaattgtaggattctatttctgtaaagagaaggcaagagaggaatgcagtgtccaccatccctgcagccctttggcgccttccccctcccattaccttgaagtagagggaaaggggacgacagaagaacccttagaagtaagactttttctgtctctgatgccacggacctttgaaatatttttttgaaaagaaggcctcccttggctgataccttctgactgttagtgaataaaggaagtttaaacaatctcttccctgtaatcattaatctcgtcttctttgttacaatgtatgttgtggtctttgttacaatgtatgttcacgaattcctagaacactgttcccgttggccatgggatcaggggaagagagaaggaagagagaaccagacacaagttggagggaatccatctccagtgctgctcagaggtatgacctagagcaaggggtttaggctttcttggactcattttcctcggtggtgaagtggggataatttattgacagtggaccgtgaggttctgcgcacaaaattcgttgcatagcacctgatacacacaaagctttcaggcaaggttagtttcgggtatttccagccttagtcttggctgtgggagccataatggagttgttcagaagtttacagctagtgtttataaattgcttgccatggggccttgtatacagtaagcattcattaagtgttccctcctattatatccttaggtttaagatacaggcaccacaacataaaccacccccagagtacacatgcatgggtgtaatttggtgccattctcctcccttttgcccccaccaaaatgaagtttttagtgtaaatgtcatgtagattttaaccaaaggttgattggagggtctgagtttctcagctaaatgaaggcatgaggactgtatccctcctgaagggtgtgatcagttccatgagaaagaagctgcgagctgtggggcatccaagataatgtaatctgccccggggtcctgtgagggactggccgacaaggcaggctgaatgcagccttgcccactgagctgggttctctctgctttaggtcctctctggaggtgaagagggaagtccgctgattgtttttctcttggtgcaacttcgcaccacccttacatatcccagtgtatatggtagccaaggacagtactgtttgagcctcccccattaagtgtcaacattgaatcaatgcaatcccatgcaaagaaagctgagcatgggattgtgccggtttagccagctaaagtgtggtctctgatgctgatcatgactatgaaaagggaaaatggaggagaatgatgacgaaggaggaggaggaggaaaaggtgacttgcctctagctgatgtggattatttctcttttttaatttccatgtctgtgtagcttcatcatagatctcagcttaaggacaatgaaagtcgtttattgagtacttagtatgtgctggttgcagagccaagtcttttttttttttttttttttcctccttttttgagagagagagtctcactctgtcacccagactggattgcagtggcacaatctcaactgactgcaacgtgcacctctcaggttcaagcaattatcaggcctcaacgtcctgagaagctgggactacaggcatgtaccaccacactcagctaatatttgtatttttagtagaggcggggttttgccatgttgtccaggctggtcttgaacacctgacctcaggtgatctgcctgcctcagcctcccaaagtgctgggattacaggggtgacccaccacacccagccagagtcaagtatttcaagtattagagttgtctgcctgcctccctgtctccctgccttccttccatctgtttgttatctgacttaatctttgaaataacccaatgatacatgatatgcattttctaggtagatagatgaagggttaggaagatgtaacttgtcctaaatcacgtgtcttctaagcggtggaactgattttctcactgactatagatgttgagcccattaatgtgatacctactgccttttaattttaaaagttctcattgttttatcgttttcatcattatcatatgatttacctcttctcttgtgtcttataatccgattggtcatgctgacatactaaaccatattgtttgccactgggaaccaattcatctgtgaaaagtcatacagataggctcgaagaaagagcttggttgtgatgttgttgttgtgacaactgtctcgggggctggagttagagccagggtcccagctgccacagttcatgtaggggtagaccagtgcttccttttgggtgatgaggaagctggatttggcagctggttttgtctggatttgaaagggaggtaatcaggggtgtgctgggagggccagaacgatccacccacgtgttggtgccacccggcagtggaaaagcctctggcctcggccttctccggaaggttgtccgcggtgccagtgagagctgcttttcaccttacagcagccccggcctatctctcaggaggcctgctgataatcagtaaatgaaattcacctttccccgattcttgaaaacggaaaagatgagggttgaattatagggcaaatcatgaacactgtcttttttccagcatggtattttgagcggcacagaagggggtaattattttatttggaagaacaaatttaagtttggcagttacctgaaagaaaatttagtgattgccagtccattctctagccttctgaagaagatagattgtaatctttaattaagctatcactcacaccaaaaaaaaaaaaaaaaaaaaaaaaaaaagcggggcaaggggttggagaatgttcatatcacattattttggatgtctggggttgcacctggaagctcagatagcaatatctaggcacggctgccagcgctctatacattgacgtttgtttaatattttaatttccccatgagtcttaaacctctgcgtggtgtgcaagttgaggcctggtgtatgcacttcggccacgggctttcccactgtaatgaagatggaatgactccatggatgacctttccgtgcctttgtctgtagcctgccctcctctttaactgaacaccttccagacgagcatgctctgaactcctgaactgctcattctgttctctgagagaattgctcaagctgcagtttatcattatatgcctccaaagactttgtgtttcctatgtttgacatcgagatagaatttttcataaccctttactagtaataaatttgattgttaagggaccaggttaatcttatttctaataccagcatctgattttaaaaccctgatttaggagcattttctttctgctaccttcctaaaacgcatgggtggaaatgtataaaatatgtcacctgatattggaggattgtttatttctgttcatttggtcctgaatagtacctatgagatgcatttgaaaacttaccttgtttatatgtttcttctgttgcaatttcttccattacctggaatagctgctttggacggcaaaccaagcaatgccctttcacagctgtgggatgaatggggaaagaagtcttggtaaggaagcaattcagagaacatggaagcatctcatggcagcagtcacaattttgtgttgcgtaatatttcaggaacttgcaaccctgataacttgtgcctgcctgtctgtaggcctttaatgatgttttattgaattttggttttcccctagactttgcagtgcatgacacatagtaattgctcaataaatatgtgttcaactgaactatggtggttaggttagtaattagatgcacagacaaaatcacaggaatctgcgtgagccttgtcctactggtaaaggagtcttgtgaggattaattgaaataactcgcaaaaatatccagctctctgtttccctgctaggggctcttgtcataggagccattgttgtagccttagaaaacatacagcattattttagggggagaggttagagtagaattttaaagagtgcatttctcttccagtaagcaattctgcatcgataaaaagtggagaaagaataagtgaaaaaatatttagttaattcttgttgacagaagtaggacttcaggtccacatatatttcattgtagagtgcacacatgcatttttaagaatttcccgattctcttccacgtgtggacagattggcacatatgtgtgtgtgcaaattgtacttgcagtggctgcctgggaaatgaaatttctgcaccttgccagagcatgttttccctctaaagagaggcagctcataattagtaatgctaatgtcggggtgagatgcaatagataatctaacaccagcaatgatgcccagagcatttatctttgatgctgggaatgcgttcattttctttatcttgccattactgtacctctattgggaaatttactctctcttcatagataggatcagatccagtacatatttataaaaccacacttacatttaaatacaggcctttcccatttcacagtgtttctagctcccctttccaatacatctctctctctctttctctctctctctctctctctctcacacacacacacacacacacacacacagccaaatcagacaccaatataaactgtagagttaacattctttttccaccctcacactttttttagctccgatctgtgttcaatttctgcctgagagagtgatatattcatatatttaggtatagttagaaaaagcaaaatggtaacaatagaatcttgatgggattgatctcctgcagcaaggagcaacagaaaaaaaaaaaaatggaatcaagaacccaggtgctttttataggttaattgtgcagggttatcatgtatctctttaaaatcaccatcttgattctgagctttggttctacacattagaattgttgcctgggcctggatttttccccttgcatgttgcgtgtggtagtccagcacatttgctgattgcaaatatacttgtctcttctcatgggcattactagtactcaggaaatcattgatgtggggtaaaatgagaaaaggattagttttattttggacagataaacaacatgtcattttaccaattgctcattaatgctgatatttcccgtgggtctctgactctgaaatctgcatggagtggttacaccctgggcttgttagctcctacctgagctctgagtttctgtggatttctataggctcctgcaaattttatctagtggatattttgttaaaaaaaaaaaatggggtctcattctgttgccccggctgcagtgcagtgacatgatcataactcatggtgacctcaaattcatgagcccaagcgatcttcccacctcagcctgagtagatgggactacaggcatgtgtcaccatgccaggctaatgtttaaaaatttttcttagaggtagagcctcactttgctgcctaggctgatctagaactcctggcttcaagtgatcctcctgccttgagctcccgaagcgctgggaccaatagagatttctctgagaattaggtcccccactattaataaggtcattgtcagctgagttggggaggtggcgtgggtagatacaattaatttagattttttaaaaggcttttgagaatattcggagaacctaatatattttgagacctgacatttattttaaacgtgaaaagcaatttacaaaattgcacatactctataaatacacttctgttataaaaatagacacgtacggccgggcgcggtggctcacgcctgtaatcccagcactctgggaggccgaggcgggcggatcacgaggtcaggagatcgagaccatcccggctaaaacggtgaaaccccgtctctactaaaaatacaaaaaattagccgggcgtagtggcgggcacctgtagtcccagctacttgggaggctgaggcaggagaatggcgtgaacccgggaggcggagcttgcagtgagccgagagcccgccactgcactccagcctgggcgacagagcgagactccgtctcaaaaaaaaaaaaaaaaaaaaaaaaaaaaaaaaagacacgtacacagacaaatgttctgacagaaatacactgagatatctacagtgcttgtctctggataggatagggtataatttaattgtttatagttaagttaatgaacttggccagacagacctgggatcaaatcccgcctctatcatgaattggctgtgaggtgtgacattgaaaaagtgatttagcctttgttcccctccaggtccttatctgtaaggtggcagttacaataatacccacctcccagggttatatgtcaatgggttaggcacagacctaggaactcagcaaatggactactatgaagtattagctttttactgtttctggttttctgatttttgtctcctgttgtgaacatacgttgcttttgtaatatgaaaaataaaaaataaaagttaaatttgttttgtttgtaagaatcagttgaggacagatgggactatttgcatggattggtgtcatgtttgaagtcagttaccagagggtttctttcaacagagtataccaaaaaaaaaaaaaaaaaaaaaaaaaaaagtaaattgcacagaccccagcttaggacctggacttaatcttcatgatgtttgtaaagtaatacttcttggagaaacctcccaaatttctatcgacactagacatctcaggatttgaaatgttaagctaacagaaattgttcatcaggtgtatctccagccctccgtaaacactgccggatggatgaacctacgtaatgatctcctggtgccattttcctgactgtagatacttgggtaaggaggagactttgactctagatgacatgatgtaccctgtgttctgcaagctggagaacatcatgtagaatctgaaaattaggagagagaggcaatcagaagaagacagagtggtgttgcagggacctgcagtcagcctagtcccccagtttgcgtttgaatttggtcccagattttttttgtttttgttttttagtagttaaagctgagagcaaaccacattgcttactattgtcagggaatgaaaactatgcaacagaagccgatgtgcagaggtgaccgtgttcgctggaattgaacttaagcaggttcctaccgcacagatccacacaggagggattgcgtaatgcacccagcagagttgtgctcaactgtgattttataaaagacacagaaacacatattaaatagacaattcttctatcagccctctaaactggcataaccttgaatcataattcaatgaatgcatttctgtgagaagtgaaggtaataagctccaagtgctttcgtttcctttctttctttcttaatgcagggaaaattgagatgggattctcagttaaaacccaaacgacgggcctgggggttgtcacaatgtgatccctgaggatgttagccccaatgtctttctgtagccagaaccaatagaaaaatgagaggaggagagtagaagcagaatagcaaacaatttttcctttcatggtctacctgtgtgactgtgtatatgtccagaaggggatgtggttggggaagggcatagtacacatatttgagcagagtacatgtgtttcatttcttgctcatacgacatgtccagtgtgggctggcatgttcttctgcacagtccctgagggacccggacttatagagtctgtgatctcacagctgctacatctggcacagatggccttcttgatctccagttagggcgagtcacaacagcaattaaatggtttggtctgaagtgtcacgagtcgtttcctcttggctgcctactggctaggccagtcacgtggccctgaagagggtgggaatgtctcatccccctgtgggcttagaagaaaaccagaggtctgtgcacactatggatttttactacaatgatgccctttcacatacagcgagaaggattaagaggtactgtattgttggttgataaagtcaaacttgtgaacagagcaaaagggcattgcttggtcattgcagcttccacccatgcaccttacacagaagtttgggccctaacatggaaacttttcaacactggccaaattctgtttgaagcactgtattgagcataccatatgctgaaagacttggaatgcaaaaacctaaggccaagggcacttctcaatattaaaccctcagttgtaatggaggcatcaagactataagacccaagaccttaacttttgtgctccttgtcttgtggagggaacatccatcctcaaaacagaaacctgtgagatcccttgaatatactgacaatacactgatgagaattgaatgccccataaattgcatctcccgcagggcctgataggtgccctgtcttcctgcttatgactctgaaaccctgtttatttgtatcaaggacggttggtactttaatcatcaataaactaacatctcaacagcctgccataaatttcttgtcaaaaaaagaggttatgattagaatactgtgattaaagagaatttgtagatagacttacatccctcagtttcaaagcttctagtagtagggcttagaggttcctagagtaggaaaagcctagccaagcagaaacccatgtttttgactttcaggatatttgtgaattaatttacttgcatatattggccaagatctagcataatctcttaatattcaatgaataaaaaattgagttttgagagcaaatattttggtaggaaatagagaactgacactaatattctctctgactataattgtaaaacagtagatgtctttcaccaagcgctaacattatattaattattaataaaatccaactccttaataatacaatcatagttaccatttattgagagcactcttctgaacattttgcattctttatttaatcttccctacaaccttattaagtagacattatcttcatcttattaagtagtcagttcctcatttgcagatgaggaaactggctgactgagttaaatgaatgccaaagtcacagagctgctgagtggcagagttgtaattcccatgcagaactgtgtggcatcaaagccattttttaactcattgcaatgcacagtgggttaaaatgagatgattgaaaatgagatgtggctgggcatggtggctcacacctctaattccagcactttgagaggataacttgagtccgggagtttgagaccagcctgggcaacagagccagaccatccatctctacaaaaaatttaaaaattagctgggtatggttgtgcactcctgtggttccagctactcaggagactgcggtagggggatcacttcagcccagaagttcaaggctgcagtgagctgtgatcgctccactgcactctagcatgcgtgacagagtgagactatctcaaaaaagaaaaaatgagattatggccaggggtggtggctcctgcctataatcctagccctttgggaggccaaggtgggaacatcatttgagcccaggagttaaagaccagcctgggcacatagtgagacaccagctttacaaaagagagagagagaaagaaagagagagagattatttctagaataagcaaaccaaacgtgaattaagttttcattctcattttagtgattctctaagtacatacccacattctgattccctcagcactttaggactgactgattagcagtaactgccctcccactggtaccactgtggccagggagtgactgcaagggtcaaaacttttgttggggagctgtttggactaagtgaatgtccagccccaactcagggatgttgtattggttctaatctctgcttctgaggaaatggttacctgcagggcgattgtggcctgctcctcgtgggatatattgagatggttccttttaatccatttcttttaaaaaaaaaattctttttaaagagatgggatttcattatgttgcccaggttggcctcaaagtcctgggatgaagagcttctcctgtcttagtctcctgagtagctgggacgacaggtgcctgcaaccatgtctggcttaaatccatccttaaacaagttcaatgttttatttccttcagataaaatgagagtggagagaccacagtgatgcccaggaatagtcatggttggcgattaaatagccattgagtctctattctgaaacaggcaccgtgttcatttgctatggctaacatgacaaaataccacccactggggatattaaacattagaaacttactgtctcacagttctggaggctggaaattcaagacaaagttgctggcagggtctctctgaggcctctctccttggcttgcagacggccgccttcttgctctgtcctcacgtggccttccgtctgtttcttggtgcacatccctggtgtctcttcctcctcttataaggacaccagtcctcttggattagggcaccacgcttatgacatcatttaacttagttaccctttcaaaggctttgtcttgaaatacagtcacatggagggttagaacttcaggatataaatttgagggggacgcagtttagtctgtaacatgctctatgctgggcacaaggaatgttatggtggataaggggaaaatggtccctaccctctgtcagttttttatggaagaagaaagacggtctttaaagaaatttacataattaatcacaaaaagctaatactatgacaaagaatgtaagttactaatacagcttagaacagatgactctaaccttgtgtaggagctagagaaggcttctctgaggaggtgaggttggaactgaagcatgaaagggaacagaagggggtcaggcaggagaaggcttgggaccaggaggtagagaaaacagtagtgtgatcagaactttaaggcccggttctgtatacaacaggtttcgggacttgaaaggcagcccacattgagtgtaactagaaagtgagggcaagagattgttcaaaagaatactggacccagagtttcatcactttgttaattacatctcatattgtgggattgcaattaccttgcccaagaaaagattatttacgattccattgtttatattgtttgttgaaataattaattctcaaaacttctggatacctgagactcagctaggaacttatttttaaaatataaattcctagtcccactccctaaagattctgagttagtacattcaggatggggtctaggaatcagtgtgtttaagaagtgcatcaggttcttctggtactgattgtccatgaaccacactttgagaaagctccatctaaagagataagttactgacgtgtgttaccagagagagcctagaaaacctgggcacaacagtagttgttaagaactaccagacctgggccaggcccggtggctcatgcccgtaatcttagcactttgggaggctgaggcgggtggatcacttgagcccaggggtttcagatcagtctgggcaacatggtgaaaccctacctctacaaaaaatagaaaaaattagctgggcatggtagtgcatgcctgtggtcccagctacttgggaggctgaggttcgagggttgcttgagcctgggaggtcaaagctgcagtgagccaagatcatgccactgcactccagcctgggagagtgtgagaccttgtctcagaaaaaaaaaaaaaaaaaaaaaaaaaaaaaaaacaactaccaggcctgttggaatgtctgccagtttcaacccacggggatagggtgagatgaacattgattgagcctttacattggagacactataacaaatgctttgcgtacatcagctctttcaaattaatacaattctactagagggggcactattagtatccccaatttacagatgaaaaaaatgagggacagagaggttagatgtgtatctaaggtcacatagctcacaaacgacacagcatgcacccaaatgccaggtttcaatgaccctgtggtgaagtgtgattgctggcatttgcctagtgttgactgtgctctagacactgtattagttacaagtgattctacttctcattcattaggccatccagaaagccttgtgctttagtctgtcctggctactataacaaaatatcataaactaggtggcttataaacacctgaaatctatttctcatagttcttgaggctgggaagtccaagatcaagctgctggcagattgagtgtttggcaacggcccactttctggttcctagatgttcacctccttgctatgtcctcatatcgtgggaggggcaaagggtctctctatctggcctcttttaagcccttaacccattcatgaaggctttgcctcaatgacctaatcacctcccaaaggccctacctcctaatatattatattggtgattaaatttcaacatatggctgggcgtggtggctcacacctgtaatcccagcactttgggaggctgagatgggcagatcacttgaggtcaggagttcgagaccagcctggccaatgtggtgaaaccccgtcttttctaaaaacattttaaaaattagccgggtgtggtggtgaatgcctgtaatctcaggtactccagaggctgaggcaggagaatcacttgaacccaggaggtggaggttgcagtgagctgagatcacaccactgcactccagcctgggtgacagagcaagactgtctcaaaaaaaaaaaaaaaaaaaaaaaaaattacgaattttgcgaggacgcaaacatttaatccgtagtactgatgtggatatgatttgagctaagactctgctgttgattctcttcaaaaacttggcagtagcccttggatcccattaattgcattcaacagtcatgtattttattaatttttgttcctaaagaaaaaaaaaatccagattgcttagaaaataaatgtgactcacgcagagcagaatccgaattttctaagtgatgaacatgttaacatattattttaatctaaagacatcctatccctgaatttagggggagacatttttttaagtaaggtttatttttaaaattgttttgcaaacattttaacagtacatcactgcctcattggatgaatcatatttttaactttcacttcccatcaatttaaacatcatctctcaaggaactgatgggccggttgactctaaatgattttgcctttcatgcagtattgttccatccgcctgccacagaagtgattccaggtcattccaatttatttaattaattttggagatgaaattattttgcccaataactagaatgctaatgggacttagtgtaatggtttagttcaggtttgttggtttgaaaataaacgccttcatttcaatatttgccttttggctgcagcccgttaactggtcacatgctgtaacctcattaacatcaaggcttaattgtaagttaatgtgcacctagtttttgtaaagaaggtttctatcttaactgccaagttttgccccccaaatatagccccaaactggcatttccaacagatggatgggttggtgtaatataattcatgcttttaaacatcatacttttatcggtgccttgataataaatatttgaacttatttttagaagttagaataaagtgaggaaaataaatctcagctctctagagtgtcactgtggtattgagatttgtggaggtgtactacatccgtaattgggagagattgccggtcgtaaaggagggacaatagaacctctgtagaatcaaaggcagaattaaaatctgcatgttaatagctttcctgccagccacgaatagattcattcttcacgtctcagatatataaagcttatttcaaaataaattctggggagcgttcaacctgattgaatctgctgtaagctctgttaatatatttgttcgagtcacttgcactcaaaaggtttttagacagaatatcacttttttatattattcatggtaatgtaattcccccctttaatctcttcagggtttcccattcagtcatgatatgcggttcagagaaagttggatcgaccattaatcatgctatctcgacttctgtgtgtctcctttttgtccatctcttaaatcagtcacttggcagcagcaagacatgtggccactccagaccatttgatcgaagagctcttgttaggagattaggctgctaatctgcaagcgagctaatggaaatcattctgggcaaggaaacaaaactgaacaacattagcaaaatcactacatattataggaatcaagtacattctgaacggcttaatcctacagtttagatatgaagcctaagggtaagatgaacgtcttagatgatctgagatatccaaatacctgtaacaaacatttgtatggtgtatgtagggcaggaaccccatcagaattggggaatctttaaaggattttttatttagccagataaaataaacaaggacagagttgactgagaaaaaagaaagaaaaaaaagaaaagtcaggagaggaggactgaaaattcccatcccacccccgcaacaatgaagggaaatgcctaggttgaaaacacgcaatacacattcaataaatgttcatggttgaatgaagttacctggtagggatttaatctttatttcaaaaagagtggctgtgaatctttaaaaatttctttggttctttaacattctcttcttcactaaacccaaattaataattccttactattgtcattaaaagttctcactggatcattccatttatactcagagtaacaaagcaaacccaattatttgagagacactgaaatgaattttgagtctagaacagcatctgcaaactttgcaaaggttcacatgataaatattttctgctttgtggcctacaaggtacctatcacaactactaagctatcatgcattagtgaaagcacatagataatctataagccaatgggcatggttgtgtgacaataaaactttatttagaaaaacaggtggtagactggatttagcttgtgggttgtagtttgctggcctctggtcaagagcacttgtttgtctgggagacataatttcaaaaatcattttcttttttgattttcatggttttagaacatgatattttctactatggatgaatgctcctcttttgaattttcatttttgtctgacataactcaaagtgcttgctttgggagttcttgttaaccctgacaattcttgtcaaatatcttactcctgggctgtgctggggatggcagcagagtggggtggttggatgggaaggcgggaaagagctagcttggagatgatacgcttttccatccttgaataacttgggaaaaagtcaggagtgtggaatgaagaattggaatataaaggctgagggcggacctaattttttttttaaggattaagaaaaaaggagtaagagagatggtatgacttatcacttggctggggactcagcattaattgataaatccactgtaaggaatgcatgacactgtcttttgaagaaagacattgcatgttaggattctgagtaacagtcaatatattcagtgaaacaaatacctaatatattccatgaaacaagtatcgtgaatatattccatgaaacaaatatcatgaatatattgtgtgaaacaaatatcgtgaatatattccatgaaacagatatccagtatattccatgaaacaaatatcatgaatttattccatgaaacaaatatcgtgaatatattccatgaaacaaaatactgtgaaatcataccactgatttttgaagaaacctaatgaaaacagcatgctcctatatcttttttctgggtgatctttagatatctcgtcttccaaacttttgtgtagcattgtctgaattttcccaagaaaggaggatgttgatctcctatttatttatatttatttaaatttttaacctttacattgacccagtgttgtaaggaaatgggagaatattgccctgatgtctgggaaattgggactcccatcctacaattcaagtgttggaatgttgcagggaggctgggctaaggtgttctgttcctgtctctggttcaaaggaaaggaatagcctagacctaaaggattctgtctggtagctgtttgctcttcgcgcctgtgctttgaatggtgaataccctcggcgggaggcaggcacctgatgccactgcccccgccccacctgcccccgccccgtttctcagatcacacaggcaggctgaggagcgcttaacaccccagcctcccatgaagcatcctgaaaaagcagactttgtcttcctccatcagctttgtttgtcctctgccgagactccagggacatgattgctcttcattttacgctcgagatcaaaataaacagaaaccactttcagctttcccgttccagggttaagtgcccaagcaggtgttgtttctgttatgtggtttgcagtgagcaaaaccaccccctcttacctgtggcagcaaaggcagggagactttgagacctggggagggctctctgctgtgttaacagaactggctcttggttggggggtggggggcacccattcttggcttcttataacacttcctttctcatgcattacctggggctccctctggaaagaaaatggtggagaggttactggcctgatgacccagggacccaggcagtccttacagggacccagaatttcacatgcaaatgtgacctccaattaaagctggacttgattaaccccatttcccctcaaaagatgatacttgtaatgccgttccgatgaggccgtctcactccgtaaactgtcatctgatttacacaaagccatctgcttccatacggggtgttttatttgggatccaggaggggagaaggcgcatctgccccctccatagcatctgaatcttaatgaataaaagcactgacacttctttaaaagggaatagcgtgatgctatttacagtttatacagttttgtaatccagctccatgctggatatttaccgtcagtcatttgaggaagttcacttctctgctggttttctgagtgagggagcgatgagtagaggagcagctggagggtccaggagccccctgaactgagtatccggtgggaggtcagatttccgcattcagaacgagagctcatacggcatccacgcgtgtctttctcatgcatatccccagcccgagtagaagaggacttctgcatctctgttagttctttctcctcctaagaaaaagcagattttaagtaacttatcatttgttcatttaattactcattctttattccttcttcattcattttccttttctccttcctttctccctctgttctctctgttttaacaggttttattcttattgtggtatggtaaggccaagatgaggaaatgactgctattgcaaagatggtttgttactcacagatccatggggactccacatgccacagggagttacctgggaaagccccagggttgggcaggaggcagagggagagggggagaactgtcaagagttttgagctggaagctattatcctcagcaaactaacacaggaacagaaaaccaaataccgcatggtgtcacttgtaagtgggagctgaacaatgagaacacatggacacagggagggaaacaacacacactggggcttgtgaggagtggggttgggggagggagagcatcaggaagaatagctaatggatgttgggcttaatacctaggcgatgggttgataggtgcagcaaaccaccatggcacaggtttacctatgtaacaaacctgcacatcctgcacatgtaccctggaacttaaatttttttaaaaaatgtttttattgtgattttcacaggaaagaaggggccaggcagggtaagcaggcttaggattggctggcttgggtcatttccatgggctctgggacacaggggttgtctttaggtgtctgacccatggctatggggtgattagggtaggtgggtgtggcctggagttcgagcccaataaagccagtggtgagggtgtggctgtgaattggttggtttgcatttgaactgtggttaccagtgagctgtctactatctctaagaatccgctagagccctgtaaagaaagcctacaagggagcaggttttaggcaataataagtgagcagtatggcgccctaatagaaggagggatgcctgtggccaatatacacggctcaaagttgaccatgatagagaacctttccctagaaggtctgtgagggaggaggcctgggagagacagcagggtgaccagagtaagtgaagtcaccgaggtgccaatgagtgtggccctgcaggtcctgcagacccccctggtggcagtattggtggtcacagctggcaaagggaagtgtggctgcccggagagcttggctgaggttggaacgtgggagtttaagagagcaaactcccacagcttggtgcagagagaaaagtgtagaaaggtcgggtgtcatacagcagagggctgtgatgctctactgaggagtggaagtgtttttctgagggcatcaaacacgccgtcaagcagggaggcaacaaatctgagttgttccacagatactttgagtgcagtacaagttggtaatgggtaacaggctaaaccatgtggcaccccttccctcttatcagcttcttgctaccatgcagaaaagtgctgaaggtggcctgccctaaggcagtagcactagagcagggatggggaggacttggtggccagatgcatgtggacatgatggaaagggaagagaagaactgtcaagattttcactatcagtggtataagccccgtagtaatatgcctagtgttccattattggaacactaagtatgtgggaattatttatatcctaccgctcaaagccatcaccaaggtctgatcgtgaaaattcaaaaaattgcaacctgaggcataaatgggttttaagctccatacagtaaaacctagcatatgaaaacagttctggctgatgggttggtagaagtgatagatatagatacatacatacacatatatgcacagtaatagatataggtaaagaccttgatatatgtacatatattgtatgatacatatccatgcatatacgtgggtgtacacacacaggtacacacaaatatatatgtgcctttggacaagaaaaaatccccaggacagtctcatttggcttttaaaatgctgcagttgaataggaccgtagaggtggcctaaggcagccttccattcagggcacgcagatttggttcctcagctcccttcttctctatttctgagtcacgtgggctgcacctatctgtcagaagcccactgcccacccagagcccctgactctgaatggtggcccagtgctttctgaagacagaggtgggacctggtgctggagacaatccattcctttcacaaagactgtaagccttacccaagcattaattttgctgcataggcggcctgttctcccacaaagcactgagtaagaagaaaaggggcccggataaaccagcagggcctggcagacaacttctggctcccttgccatttaaggtcccgaggaatgtggagacattggtgggggccagggtgggtttggaaggacggattttttcctctttgtctctatctctctttctctctgtctttttctctttctctcatagttaatgctatgattttgtaaaaaaaaaaaaaaaaaaaaaattctagtttctcagaatcctcattggaggcatgtgtatatttctaaatttaaatgtattctcctatactgtccggggaaaggaagcatttttcaaccaaactgaaagggaaaggtactcttttttattctaatactcacatttcccaaaacatatccttaatattgtacatttggcacagttattgttgaatacttggaaggcgatgtgtatagcatacagagctgcagctttggactttgtggctttaggtaaattacttattctctttgcacctcagtgtattcttctgactaatggggacagtagcaacatcgatgtctcggggcttctgtgagtattcatcaaggtaatatatgcaggccagtaccacattccccactaaaggagtgccacttttttttttttttttactacttgcattattgttgttgttgttgctgtacgtctgaagggctttagtcctcttatgagcaaggcaaaagggacaatgttcaccctttggactggaagtaagaagcccctgcagttccaaatgactccacatttggaatgatttcacaaggagtgcaaaagaagcctcttgtttgactttgcccacaaatgccagaggaggactcttctgagccatgccaataagaaaaatgagaatgccagcttaaataaatgttatcacaatctctgcagaatcgtgatgtctccgattcttaaaagtgtctactgcagggtatttattattctgtgataataataaatcgctgcttatgaaatgcaaggaatcgagtgtcatggaggggaggaagggaagtaacagggagaagaactgtgagagatggaggtccagccaggcccgggctattaatcatcgccctccattatttcctgaagattcattcattgttccataggtacctagagggtcaattagagaccacagacaggctttttcaaagacgcaagagggtcaattaggccctccttataattttctgctttaacagcaaatgccagcctatcgtgcatcagatgcaagggagtttggaaataaacagggtactttccctcctcctctaaaaaaaaaaaaaaagaaaaaatccaacacagagacatggagacagtcggcgattgggaacgcttggcttgctggctgtcaggatctggttcaaggaaggcaaagggaattttatcaccaactgggacttgagaggagcagagttcttctggtctcagagcacggggaacggtcagggaatttgtatgatggagcaccctgttcccatatctgagatgattcatttatcttgagtgccatcttaactacaattagagtacaattataaagtatctacaatggaaatgggtcttgaaatcaatcgcagctggaccggcgtgcggtgagttgccgtgcccaccacgactgctgtctgtgtttaggacagagttcaaccaaacgtaccggtgtgtgattttgcacaacactgctttgtatttgttttccctgagaccggcaaacacattttttatttattttatttttatttttcgagatggactttcgcttttttgcccagcctggagtgaagtggcatgatctcggctcactgcaaactacccccgcccccgggttcaagcaattctcgcacctcagcctcccaagtaactgggattacaggtgcccaccaccaagcccggctaagttttctattttcaatagagatgaggttttgccatattggtcaggctggtcttgaactcttgacctcaggtgattcacccacctcagcctcccaaagtgcagggattaaggcgtgagccaccgagcccagccggcaaacttactttaaaacacattgcaataaaataaaaagaaaagggattgtcctaagtgagaagcagagatgaaaatgtggaaggatgattgtgagaagtccacattgctccatttggacttcctttttgtagtgggctattagattttgcctctgcttgtttctgaatacccaagcttgctaacacagggaaagaccaattatcatgattattattatttaccttaagacctgattctacctatctatgatcacatagacatttggaagcaaagagaaatgcttttcatgtgggaaaaaccaataccaacttcagtgatattatttctccgccccccgcaccgggctcttgggaatatctcttagccctcaattgtcacattcattcagcagatgttagcacgtgcaggcaccattctaggtgttggggatacatccaaaaacaagcaggaaaaccccattctcttcatttctggaatgccggagcactgggcccatggagcccgtttcacttacacgtttttgtcgtctttgagtttccaagaagggagtggcactatagctgaagaggatgaccctctatcacagcctttgctaaaaccactgaaaactgtcttatttttcattttgcccggaaatgcgacacataagtgcattcctctagggaaggatttttttttttttttttttttttgagacaggagtctcactctgttgtccaagctggagtgcagtggcgcgatgtcagctcactgcaacctccgcctcctgggttcaaacaattctcctacgtcagcctcctgagtagctgggattatagtcacctaccaccatacccagctaatttttgtattttttagtagaaacagtgtttcaccaggttggccaggctgctctcgaactcctgacctcaggtgatctgcccaccttggcctcccaaagtgcagagcaggaatttcattggatttctacactgctgctttttcagagcctggaacagtgccaagcacatagtcggccctcagtgagcatttgttgactaacttaggtcacagatgtggggctgtgattctgaaggccccggctcattcttggctttcagagaggtttgctttcactcctgggcagcagctgccctggctgctgccaccaccgccttcccggaggtcagctttattttcagtgtttttgcccttccgatccctgggtaagaagtaagaaaatttctagtgcctggagtctccatcctcgtttcccagtcatatcctagaagctgcaaattgctggcttgtggatgtctttggtttggcctgctgaagtttgttttggattttttaatgaaataaattagctgtgaacatttaaaacttgggagacatcccatcaaaattgggatttcctgcttatctcgacaaagcagatctggcatcctttgcctgcattttacatttggctacagttggctggacttgagcagcggctgcccctctttagctggggcatgtgccctgtggtttgccatagtacccatcaggcctgcttcactcattgtagaaatggcctggcctcctaggcattggagatttctgttatgctcattcatgagcttgcctgcttacacctagctgttgtgttggttctcataggtctccctgattccagcctccaattcactgagctggcctctgccagtgtcacttctccccagtcttggctttgatcaagcttggaaaggcctggcctttgtgttgtcacattcttctgcctagagtatgccttttccttcaccaaaccaagtggctctttcggaagacttgcctgaatcctagaccccttctctctacaaccttcagtctgagttgggtaccttgcatcctcctttgttcccatactaacccctacaaccatggtcattttgtggttatctgtttaattctctgctggctattccaggctgtcagctccctgactacaaggactttgttgctcacaatcatatccacggcatccacacaagatctggccgctacgtggaaggacacatagttccgtctggcttggagcctagcttgggagagggacagtagtggggaagggtgagcttggagatagagctgaccttcccaggtgcttcagcagttacagcaagattctagatcttaccctgacagtcacagaaagcactgggagcgtttatgaatgttgtggtatctcacataataaggggaccatgcatgtattttagaaagagccctctggcttcagggaagaacgatggatttgtgagggtcaggactggtagcaggtgggctcctagaatagtcccggcaagagatcatggaggccagagccagggatggatatagactaagacatgcctgtagactgagtgtcgaggagcaagtagatcaaattctagcatgagactgggagaaagagatgttctccagccaatggatttatgaaatgaatgaactttttccctttcctcccaagcattgcctggatcaccttgttaatatggtttcttattaaacgtgctggaaaaaagaggctctaagtgcgtatgcttttaaagcaacactattagcaaatggccactggcttcatttttcctgtgcatatatttttgtgtattccgggaggattttcttttctttttctttttaatcctcctcctcaagggaaacattcttctcacaatagcttcctggtagaaagttctaactaatgactttaatcgtgtgaatgtattgcagaaatggacaggacaattctcagcccattcatcttacagacctcaagtgaacaggcacaaaacaacaggctccaccctccttcccccctctatctcatactttacctcaatttatgacttggcttacaatccgttgcagaaagcctagctccccagcttctcctgaatctacgtttttctattttgtctgaactagccaaggtctctggagtttgctgttatattgcttcagagaaattagtgacattgaaaggctgttgtcttttttagtgtacttttggttgttaggagaaatttacaaggccatttttttctcccgtctctgcagttcaggagattatattagaaaatattctatacaaaaaatatgcatagtagggcttttctccagctagtagctcagaataagtcagtactactgaaacaggtaccttttgtggaattgattctgaaatctgtttggatctgaaatctttctttcttgcctttgagtaagatacggcagagaaaaacaattacactagctgctggtctgtatttactggttagaatagaatattattaccatcaagaataacattagtggccaggtgcggtggctcacgcctgtaatcccagcactttgggaggccgaggtgggtggatcacctgaggtcaggagttcaaaaccagcctggccaacatggtgaaacccccgtctctactaaaaatacaaaaattagccgggtgtggcggtgcatgcctgtaatcccagctacttgggaggctgaggcaggagaatcccttgaacctgggaggtggaggttgcagtgagctgagatcacgccattatactccagtctaggcaacaagagtgaaactctgtctcaaaaaaattaatgataataatgttacaataataataatgttagtgatacatatcattttgaaaccagttcttaagcaattaaaaaaaagcagctatggtgattgagtttttgtgttatgaattttatactctgaaggcatggtcattgtgaatgccaaagaaatgaacaggagaaaattttatttgaaagctgggattgttgcatgctgcagaatttttttttcttttgctattgctgtgtaacaaatgaccacacacttagcagttcacattcacatcttgtttattaactacaattctctagatcagaagcctagacacaatgtgactggcttctctgctcagggtctcttggggacaaaataaaggtgtccgctggaggaacatcctttcctgcatgctctgtggaagaatccactgccaagctcattcaggatgctggcaggattcagatccttgaagttgtaagactagggcccctgtttcctactgacttctgctggtggctgccctcagctcccagaggcaacccacattccttgacttttggccccctgcatctcaaagccagcaacagaaactctcttgtgcatggagtcccctcctgctttgaatctctctgactttccttgactttgatgtctaggtctggatttcaagggctcagaaactctctcatgcatgtagttccctcctgctttgaatctctctgactttccttgattttgatgtctaggtctggatttcaagggctcacgtgatgaggatagtttctttatcttaagggcaactgatgtggagtcttaattaacactggcaaaatcccttcatgacagtacctagagtatgaattgactcagtaactggaagaatgcatgcgtacaccatggaccgggaatccgggaggccaatttagaattttatgtatcaaagccccatttttttttgaataacagaaaaaaaaaagagacctgatatttggagagactttttcaaaagcagaaagtttaatataaaagaaagggggtaattgaagaagatataaactgcaaagaaaggatgttaggtagagcgccttatagggaatcagaggttttattacaggcagacacggcttcacctgtgagccgagcaagtgattttgcctgcagagaagaacgcagggttccttctatggctcaggatcttcagttaccagcagtggaagtgaattgaaaatagttggtctcttgagtgacctgatgcaactcattatcttctctgtgccttaacgtctctatctaatttcccattaaaagtaacaggaaaaagcgcaatgacttttgcaccaacctaacaatgggttgacattcaggattgctataatgatgaagcaatggcaaatggagtctttgtttttagccccgtggaggcatatgctgggcactcaacaaacatcacttcccctgcccttttctcagatagagttatccaaacaaattggatgctcaactctggatttgatccaagctctctggaaatctctagcttctcaaactgtttcgtggtggagtgccttttgggcacaggagaaggaaataagagcctcgcgaggtttgggaatgctgcctctagctctcacactgcatgcagaattcctactctgagagctcactttatctcaaaaacccatgcatattctgcatctactctgaattccgcagtgttgtgtgttactatacgatctagtgttttcgttgcttacaagttagattcacactccaggaatgtatctgttcccacatcccctgatgctgagcataccagagttaagggaggcaagcaaggcccctaacctcccaggttcatggaggtacccattctgcacttgttgaccttgagcttgaggactccataaatgtctgcccttggcattgcacgtgcctccctctgggctgaccctgctgggcctgtcacttactcccattggagaggcctgtttccatacatagctctttgtcagttgctcacactcggtcaatacttgccttcctttgaggccatctgcactcactgacaatctgatcgctcccctgaatggaggtgaaagcatgcaagctaggagttaagatctttaactcagggaagaccctgtctatggaagtgctgagctcttcagtgtcatcacagaaaagcatgagcccctccctggtacggagtcatcacatcccatagctgagcgacgtcggagctccacgatggggaggtgacacatagtcagttaattacataaagagaacttgagcaaactcttactctgccatatgctgtgcagatccctctgaaaagctttacagatgttcttttttttttttaatccctccccctatctttctttctttgcacccacgatgctctgcacttcaagctaaatataatgtatctgattttacagcatacatactaatcaggtttgaaagttgtcttgtgaggctttaaaaagctagccaagagcagtgcgatttctccaaaaggatgtctgcaatcaagatgattacatgggaaaataaatcataatttatattgctgaaaatgtcatttgcaaaacactttgacaatactttcctttcagtctattttcctgtgtatggggtaagtgttgcccttctgcaactttccttttattttatttatttatttcttttcaatactctgaatatcactggagcagctgcagattcagggcagtatggggtggttcaggaacagaactgacaggtattgaagccaaaaattgaacaataacaacgtaggagggagaatccaaagatagtatgtgttcaggatacgggcactcgtgtgggtgaacacacacacacacacacacacacacgcttttttttttttttctttttttttttctcctattgcaatagaacgtaaaggtagatttttagaaccaaatgccttttaggaagctacctctcttccaccctgctgcctttgtgttgaataaactatattaaattatccaggaggaatgattagtgatctgattcattaatatcccttgttattaagaactgtctgtatttgtgtcctggttggcagatattaagtccacagataccaataattaatatctatggttgattgtaaaaatggccaccaattcttccctgtcccctgcatatgtacatccttgcactgtgaaattgtagatctcgccctccaaaggtgaagttcgtttgtccactccttgaaccaggatggcatgaaacttgatttgaccaatgaggcatttggaaacacggcacaagcaaaggcttgaaacgtgcttttatgttggtgcttgcccacttgctgtgctacgaacccttttacttctgggtgcgaacaagcccaggctagccttctgggcgatgagagacacaagaccatgtttccatattgccccagccaagagccaacctacagacgcaactgccttgctgacagcagacacctgcccagctgagcccagcccaaattgctgactcatgcaatcttgagctaaaaataagtagctgttgtttatagccactaatatttgtgatggttcattgcacagcaaaattgaatggagacaatacttttgaaattgactcttcgggagctgttgtaaagaagtaaaatgtgtagtgtttgcccttttcctcagctgtaggcctggtatgcagaagtattcagttatttggtgagtgaaccctcgctgatgccctggctagtgttttctgtctcaggaagcatgaacatttcatccagggttatatgctacagggatattcaagaaattgaagatccttgaaaatctagtctccctcacaaggatcaggtggcaggatctaatgggaggggtagagagtgagtgttaacacacagagaacccaggagacctttctcagaggtctcatatcaagaaaagatcatttctcctaagcaatcaatttctttttaaatctgaacctcatatctgagaatattcccttcttttatctggccactcgggagctcaaaaataaatttctggcacccttcttcctggctccagtaaagtcatacaaccatatggtacctctctggcaactaatttcacctatttccttatttgtttaaaaattttaacttaaattttttcccctcaagatctatttacggatcatcagttttattttttcttttctttcctctttttcttttgctcccttttctccccactcttgactcttctctagtttttatatgcagtttgtatttatccatgccatctgaaatcctccttcctttttaacaagacaagtagaaaacgaaaacaacatcaaaggatacactacacaattgttggagccctaggaaccgagagaagagtacaagcaggttcttgaactgttctctccccagcaactataactggaaggaacctcagtttgtccattcattcattcatcagagcagcatagcagagtagaaggaactctgactttggcattggtgcctctaagtttgaagtctaactccatcactgtgtttctttcctcttgctgatagctgatttgttataaacaaattaccaaaaacgtactggctttaaacaacacatgcttatcatgttgcagttctggggagtcacaagttcaaaatcagtctcacctggtcaagatgtcagtagggcttgttccttctggaggctctaggggagaatctgtttccttgcgtttttcatcttctagaggcctcctgcattccttggctcttggccccttcctctggcttcaaaccagcagtttaatatcatcacatctcctttactgattcctcttccgttgtcccatcacattctcctcatctggccctctggccactctcttataaggacccttttgatttcattgggaatacccagataatcttggataatcactccatctcagggtccttaatcacatcttcagagtcccctttgccatggctgatgacagagtcacaaatttggggaattagtgtgtagacttctcttgtagggagtcattattactctaccacaaccactaattctggacttcacgttccctcatccatagagcagggataacaatatcctccaggctatccgcggaagtagagaatataagctttatccagggggccactcagtgatgggagtcttccttatgaagctgtcccagctccatctctcaggactgaaatgtgggtaagaccatcacatttttcatcccccgccccccgcccccaacattgactgggcagatattcatacaatggcgattgttttgtctgcctggatggctttaacataataccatagactgggcaggttaaacagcagacctctattcctcacagtctagaggctgggaagtccaaggtgaagccatgggcacattctgtgcctgcctgaggctctctttctggttcccagatggatgcctttgtgtgtcctctcatggcagagagaggaaggggtctggaacctttctcttataaggatactaatcccatcgtaccccgtcccccatgatctcatttgaaattagtcacctcccaaagccccacctccaagtactgtcacactggggcatagggcttcagcatatgaatttgggggagctggggagaggaacacatacatttagtccataacaactatctcacttacctctctactaagtgattcagaaaatagcaagtatagtagtgggagaacatggtatcagaaccaggagagggtcctctggctttctgagttctgccaaaaaccaagttttgctgccttgggcctgtggcttctcctccctgattgtcgctggccttgctgtaaattgtgaggcatccatgtgaggcacaggatggttccaaggaccaactgaggctgtctgtgctgaggctgggagggtgtaagtgctcagaggcagccggaagctgtggtttttacctcccaagactgtgcagagcttccttcttctgtagggagaagtctctcaggacagggctcacaacagtgcagtcaggagattggaaattttagtgacaccaaagtgggctttacttcctcctcctagaattcctgccagaaaggtggagatgtgcaataaactgagcaccgatagagtaccaagaacatgctttttgcacattgtttgattcatcaatcagagtggggcatggctgtcatcagttcagagttgaaagaattgaagatcaaaggggtcacgtctctgtgaatagtattagtaatagcagcagtatcgatagcaatcatagtaattaaaatggaagcaaccaccagtgtaatcatagcagaaactcacatgtgtgtgctttctatgtgccaggcatgaggctgaagtcatacattcattatttgttaatcccaccctaagtgataggtgtattcatcattctcagtatcagaagaagaaactgaggttcagaatgacccagtaaagatcacaagcccaaccctggtgaagggcgtgattggcagaagcccaatttaagcccccatcatgtcctgacgctttcccaaagctgagctgcctgccagggtctttgctcttccactgccaagaagtaaggttttggttgggcgcggtggctcacgcctgtaatcccagcactttgggaggccgaggtgggtggatcacgaggtcaggagatcgagaccatcctggttaacaccgtaaaaccccgtctctactaaaaatacaaaaaaaaaaaaaattagcccggcgtggtggcgggtgcctgtagtcccagctactccggaggctgagacaggagaatgtcatgaacccgggaggcggagcttgcagtgagcagagattgcagcactgcactccagcctgggcgacagaaggagactccgtctcaaaaaaaaaaaaaaaaaaaaaaagaagtgagttttttttgtgtattctgaaaggttcccaagctcgccgcagcctgctattgtatttaaagggtgccctttgctgcgtaactagggcaaagaagaaccaactggctgttccccactggctgtggagagttccagctcatccaccctgcctctgtggctgagtcggggagaaaaggacaaagtttttctcccgcaactgggccaccaaaccagcagagcctccagccggggtggtctcgaggaggcccattaccggctggagtgacagagtgtgtcaagcctgcagctcgtcccgtgtctaatggaacagaaacaagcaccctgctgcccttgttttccagtggctcaccggggctctgcgaggtttattaatcttagcgtataatggaaaatgtgttgccatgtgaaatctagagcctctgttcactactccgcgaattgaaggcggcaggagtctttgtctcatttacacacagtgcctgcgagagactcttagggcagaagaacgccgtcgtaaaaatccgtgcggaatttgaaagtgtgcattaatgcatgtgaccagatggttctaaaatatgccactttcaccaaaaatcatcctctgaaaaactcttctgaacaacatcggctgtgcatagtaactgccttgagtggggccattttagaaaatatatgaggtacgggatgaagatgagggaggaaaatggttcctacttatcattactttgtccctccaaaagcctgcatgcgggaagaaaaatccacccagtgcaagaaccgtggcagtactcagaccatttagaatcactttgagttattaccaagaaattgctaaccactgctttccaagttatatattaaatttttcttttttttaaaaaaaagcttccaactttttttttttttttttttgagttggagtcgcactctttcacccaggctggagtgcagtggcccgatcctgggtcactgcaacctctgcctcctggattcaagcgagtttcctgccttagcctcccgagtagctgggattacaggcacccgccgccacacccagctgatttttgtattttagtagaggtggggtttcgccatgttggccaggctggtgtcgatttcctgaccttgagtgatctacctgcctcggcctcccaaagtgctgggattgcaggcatgagccacagcgtccagccccaacttcttaaaagccagaaacaactggctgttagctgtcacaatattaatactagtgtgtgcaagtaagtttgttttctgcttctgtcttacacgttttacgggctatcagtagatgcatctaataatcctaacactgtcatccttatacttgaggtcttattgtccacttctaccttagctatgtaaacagatgagtaacctactctggatttacccagatagtgctgttaggcaccacacacgatgagattggaggcacctgggtgtcagcctcttgggctggctcattacaggccactctgtctgaggaacactcaggtttgcaaaccgtttcttaaaattacaggatacctagggacctgttggggtgggagggaagaaccctatgggcagaaatgtgactttctgtagcaaagatgtactgtttcccactgagaagaatcaaaaatagaaaagtgcttccttgtctctctatattgttattaaaacaagtagatgcattttcattgaatcaaggcagttttcctttataaaatgtcctatttcatatcactgttcaaacttgacatccacatttgagttggtttaaaatatcactgttttgttgacattcacctgtattatacatttcagttggtcaagtcatttaatttatcataaaccatttaaggagcagttggagaaaagggggaaaaagttaaatgttaatgattcttttcgtaactgcaattttatcggctcctttttgtacatatatgattatgaagcaatttgcatgaaatttacaccttttcaaattttgaaaattgccttgttgaaaaagaatcgctgtacttctcaatactacactgattaatcacagttatagagtagacataacatttttattaaactctcagtgagcaggaaaattagcacttcctgcaataacgatactaatttcattagtgaacgttttcatttataaagtgcttcttccttatcttgaaccttttatcctcttcttattgaccaaagagagggcatatctttgggagctgctaataaaccatattcgtaatatgatgtgacctcatcgacaggctgctgcttctagctcatcatcttccttgatcataaatacccatcggtacctcttgtcacatggtgctcttagagcttcctctttgaatttcacatgtgataagagatggtttccatcctgaagagcttgcagtgggatggttatcggaaagattaaaactctaaaactaacaggtggatataaatataaagaaaatacagtattttgttgatttatgttcatataacttctttattggtaaaagggagacaggtgagaatacaggaaatccttgtggccttgtttgccttttttagaaatttaactttgcaaacaaactcaggggaaactagtgaggtggaaataaagaatgctagactacgggtctggggcccaagtgttttattaatataaaaacttgcgtataaatgtccagtttcaccaccaaatcctttctgaaacattggtagtagatgaactaatgcaacaatttatttttctttgagacaggatctggagtgtggtggtgcaatcataactcactgcagcctcggtctcctgggctgaagcgatcctcatgccttagtctcccgagtagctgggattacaggcatacaccaccatgcctgcctaattttttttaatttttcttttatagagatgcagtatcgcttgttgctcaggctggtctcatatgcctggactcaagtgatcctcccgcctctgcctctcaaagtacagggattataggtgtgagccacgaagcccagctgctgcagttactcaaccagcttcctactagaagccaggcgtttctcaagcttctgaagacacaaaggtgaaccccagacaagccaggtttacagagtgtgcatttcagtgggggagccagccaaaaaatcagtaaacaccaagataaaatatattccagtggcgatacattttcagaaacaaacaaacatggcactgggctggaaatgaatggcaggggagaaggcgggcggggcaagctttggaaagcacgggcaggtaaggacagggtttcaaaggtgagaaggagctggcagtgtgaatagccaggggaaaagtgttttgggtagaaggaacagaaagtgaaacggtgccctggcaaggcaaagattattcattgctgaagagactatgttgcccagatgacttgttcatgtaatctgtgatttttaaatttagaattgaggtttgaagggaagtattgctcctttctttatctgcaatgggaaagcttactgtagttacttacagtagaagagaaatgtacatttctgaaaatccactgaggaagaaaggggcagtgatgattctaaatgttaataatgcagacagcctttgctttatgtatcaatttttgtaaatgtgttgcttaaatagatttttatgagccagtaatggtttagaaaggtaaatgacttgcccaaggtcatacacccagtacacttgggagccaaaattcatcatagatgactttgtgaaatgtcccattaaatgtgtatatatatatatagtgtgcattacagcttaacagacacacattcatttgacacattatgttttaactttattaataagtttttgtgggcataggtcttgttttgccaacttgacatgtggattttaaagggcaagtgccttagaatacaaactgtcctataaagaataccatattatcgaaaggatgttcaaactcatcagttagaggcgttgcagttggctgggtgcagtggctcacacctgttatctccgcacttaaggagtccaaggcaggtggattacttgaggtcagaagctccagaccagcctggccaacatggtgaaaccccttctctactaaaaatagaaaattagccaggcgtggtggtatgtgactgcaatcccagctactcgggagggtgaagcaggagaatcgctggaacccgggagacaggttgtagtgagctgagatgtcgccactatactctagcctgggcaacagagctagattccatctcaaaaaaaggcattgctgttaatacaacaatgataagttatttcacactcaccagattggcaaaacgttaagtactaaggtcataacaagcactggaaggatgtggagaaatagggaattttatgcattactgaactgaaacagccattttggaaaatattttggtattacgtaataaagtagtacttagcaacttatgcaatttggttcctataaagatgccttagagaaactgttgagaactaggaaaagctcaggaatgtttctggtgcataatttgtgatagcaagaacctgaaagtcctccaaaagccgtctacaatgaaatggggaaattaatggtggcacattcctgcataggagatagcagtgataatgggtggataccagaacgtgcatcaacacagaagaatctcagcaacataattcaggattaaaacagcgtttacagctgggcacagtggcccacacctgtaatgccagcactttggaaggccacagtcggcagatggcttgagcccaggagtttgattccaacccgggcaacatactgagaccccatctctactaaaaatacaaaaattagccagtgtggtatcatgtgtctgtggtctcaggggtctcaggtacttgggagactgaggagggaggacctcttgagccgggaaggtcgaggctgcagtgagccatgattgtaccactgcactccagcctgggctacagagtaagactctgtctcaaaaaaaaaaaaaaaaaaaaaaaagcatttacataggagaatatatacagtatgattcaatttatagaaagcttaaagtataggcaaagctaaacattcaggatatttgataaaactataaagaaaaccaagggaatgaagaatgcaaaatatgagctagtgttttcccaggtgtgagggacggggcatggttgggaggaaaacagaatggtgccatggcgagagatacacaggggaggtattggaaagttctgtttcttaaaatgagtgacaggtacctaggtagtcattctatatgttattaaagtgtacacacattgcttatgtgaagtcttgttatatgtggcacatatcacataatctgaaagaatctgcttcctgtagtaaaaattaaaaaaattatagccgggcacggtggctcacgcctgtaatcccagcactttgggaggccaaggcaggcggatcacgaggtcaggagagagaccaccctggctaacatgatgaaaccccgtctgtaccaaaaatacaaaaaattagccaggcatggtggcggggtgcctgtagtcccagctgctcaggaggctgaggcaggagaatggcgtgaacccaggaggcagagcttgcagtgagccgagatcgtgccactgcactccagcctgggcaacacagcgtgactccatctcaaaacaaacaaacaaaacaaaacaaaaaaggtttaagaaatgttctagtaccttgaaaccaaaataggtatcagatacttggctgttttgttttttcttcttagccattttgacctgtgagattttatgtgatgaaaacataagaatgtggtattacaccctgtgatttgaattttccatactccattccattctatatgtcagatgcatcttcctaaaacacacctttgtcacatcactcctctgctcaaaaacattcagtggctccctgggccctctgggactaagtttataatgctcagcttgtcattcctttgcccagtgtactctctgtctcactaatttgttcattattttaatgcattttcttgaatacacttctgtagacagccataagatgggtagcaggaatgctgcactgaaccataatccaaagctttcatcaggttcacttgcttcctgtccttgccacaccatctgctcattctcgatctccacttgaacacacttcacattctccacttgtgtatcattcactattcttgctacataaattaacacaaattttgcagcttaaaacagcacacatttattatttcatggtttctgtggatcaggaatctgagtatcagacttagctgggtcctctgcctagggtttcacaaagttgcaatcatatattggccagggtgtgttctaatttggtagcttgactggggaagaattggcttcccaaatcacccagattactagcagactttatttccttgtagctttttgactcggcctggcttcttgctgactgttggctgttggctggaggtacccctcagctcctagaggcatcaacagttcctgaatatctgggcttttcccacaaagcagcttccttcatcaagccagcaacaagagtttctggggcaagttggtcaacaagatggtgtcttacatgcccaatgtaatcatggaagccatgtatacctcatcacatttgccagatttctgctgattaataccaagtcagaagtcctgcacacattcaaagggaggacactgcacaatggtgtgaataccaggtggtagggattatgtggggccaccttacagtctatcagccacaacttgaagtatcttctctcctctttgctgccaaataatgtctctgaagactgtaagacctgaatcctatctaaagttgtcggtggttgcttccttcctgaaagcaacaagaagcccatgaatgtcttatggcctgaagatctgccttcaaagactactacctgtgttgtcacaaatggcaagatttcatcctttttatggctgaataatatttcactgtatatgtgaaccacatttttaaaaatgcatttctgaacctgaaggacattatgttaagtcaaataagccagacacagacagacaaagacatatgatctgactaacaatgtggaatctgaaaaaaccaagctcatagaatagaaacagagagtgagaatggtggttgctggggctagggggtcagtgaagtggggaggtgttgatctaagggttcaaacttctcgttaataataaaccagttctggagatctaatgtacagcatgagtggtgatggatgtgttaattaattcgattgtgataatcattacacaatgtatatagtaatcaaatcattactttatagaccctgaatatattcaatatttatttttcaattatatatatatatatatatataaatatatatatatatatatatatatatatatatatatatatatatatatatatatatatatatatatatatatatttaaagctgtcatggaaagccttaaagttaaaatacgaagatttttgagaaaaactttgcatattttaattgctgtctggaatcctccttcagctgggatgagaaaccatctctgggttagttctgtccctggaggtgagggccagacaacacatcaaaactgactttttattttttttcaaagttgttaagactatctaagattcagatctccctaatactgttcctagttagtatttagaacgtatttgtttagaggatactagcctgaaatagccctatctccaggttgtctgatgcgatgaggatgtggtgttaatcttacacctacccattagtctataaaactcctgagggatgctcaggaaaccaaaaaggatgtctgcatggaggacaagaaggcacaaatcgtctgatttcaccccatcctaagatcttgtgacttcagctttgttttggactggggcattggatctcccacatgccctctcttaagtcgtgcatttgacgcatatttaataagcacctactgtgtgccattagagaccatgatacagttttgaaagcctagcctgaataatggatgacaccctcctaaagccacgatttggtcttgattatttttagcactatgaagaaaaatttcattaaatcacaactctatttacttttaacccaacatggtgaagttatcaacatataatgcctgtctatactttcagatggaaaatgcctagataaatactgcatgggacatttttaaacatgtaaaaaaatcaattttcgtaaggttacatctttttacctctttatataaaacatgctatattaaaagagagattaaattttaccctgtggagtaaaatgcaaacacaaaattatttttttcatttttcagagcatgtactggattatcatttatttatgaggctttttttaatctagaatatatggaaatcttttcttgaagcacaatataatattgaattgggaatgttgtctgacagtttccctcttaccgttgcatagaatgactctcctgtatgaatttttaaaagaaacttcaatatgctatgcatttgaaagggaagaagtaatcaccataatcttgaggtatcttttaaataggcttccttccagttcttctatgtttcaccaacttttctacaacaaataatgcatctgtgatttttcagaactcacaaaatgtccagctttctttcttttattcaaaatttatacttcataattgaagttcacctcccaaaagacatagcttggtttagcatagagctatgatgtgttttctctttgttccttttgcacactttccttgtctggaggcgttgggcttggatccttcattcttcatgaggctgatgtttttccatttcggtttccttaagtggtgaagctgcacaaccatgaaagcagtgaccacataaaaatgctgctttgaggcctggtacctcatgcctataatcctagcacattggatggcccaggcaggagcatcacttgaggccagaagtttgtgaccagcctgggcactatagtgagaccctgtctctactcacataaaaatattagctgggcatgatggctcataggtgtagtcccagctactcaagaggctaaagggggatatttcttaagcccagaagattcagactgcaatgagctatgattgtgccactgcacttcagcctaggcaacacaacaagaccctgtcccttaaaataaatgctgccttgggtatcttaatcctttctcaagattccttctaaggctaacatttctttgccatccccacactaccatctgctcacttttatatatcttgaccattttatttttcatcccatcttcactccatgtaattagttagctattgctgcagaacaaatcaccccaaaattcagtgattagtttataggtagccccatttcacccatctcattctatagctcaggttgaaagttgagtcatgaattggggaacattcttctcttggtgtaaattagtcaccagtgtctcatagggttgggctgaaacttaacacatcccatcactttgattggctaaagtcagttacataaccaagcccagcttcagaagggaaattgtatgccttacaaggaggtgagaggatggaaaatgaatatttgctgaacagactttctgtccagtttgttgtatttggtggtggtgcagggcaaatatatgtttaaaaccttgttcagatttttagctttcttcagaacagagcttttaaaactgagcatttgtcccctaaattccagcactgcggccatgagtaaagggtgccctgaccacgagcaaatcatttagctggctcacctttcatgcaaccttgaattcaccaggaaggaagttcatgcagccctgggtatgatgccctaattttgagccaagccagctagagttcaagtccaaaccattccacttcctagctttgggacgatgaacaatttacttatgctttctgggctttggttcctaaattatttaaatggggatgattacatacattcatcattttcaccttctcaaagaccttctggacaattccccaattcatagctctgggagacagtgtgttgacactctatttgaccacatcttcctagcagtcttgcggaaggtgccactttgcgaacgatctgttgctaggtaatgtcaatgacatgactttcagtttagcacatgtacagatgaccttgtttgggcttgtgccgttggtaattcagtttcaggatttccgtttgacagaatatattcaagggtggtttcttgctatcagttgtacccttgtggccacagtttttccagataaccaagactcactaatattttcacaagaacatttgtcacctaggtccagatttcagaggaaaaaagtataccgccattgttcttgtataaactttataaaatatttggggaacatcactagccacctgcttccgaaagtacttagatactgtgtcatcttaatacaagacactatgcactaattaagctgttgttgatgcttttttgcctttttgacaattaaaaataatctcataccactggattagtctcttgcctttcaattttatgtttatatacaaatatatgtgcataccaaattttatatatatatatatatatatatatatatattttttttttttttttttttttttggtcggagtctcaccctttcacccaggctggagtgcagtggcgcaatctcggctcactgcaagctccgcctcccgggttcacgccattctcctgcctcagcctcctgagtagctggcactataggcgcccaccaccatgcctggctaattttatgtatttttaatagagacagggtttcaccatgttatcaggatggtctcaatctcctggcctcgtgattcacctgccttggcctcccaaagtgctgggattacaggcgtgagccaccgcggctggcgaaaattatatattatacacacaaacatacacacacgcacacaccaaatttaaaaagacagatacataggcagttgttatgcagtgtttgaaataaatttattgccagctatgggtcatttggaaaaagatcaatatgatgcatcaacataacaagtaaatggaaatgaatacaaccgcatggttttctgaaagcacggtttcctgcgcggcttccagaattgcatccctgacatttggaacatgtgttacatgctacagaacatctgtctgtgaacaggttaatgggaaaggtgcatctctacaaacaaatattacctgtaatgctgttgtagctttgttgattgttgatattacttatgaactttcttgcttttcagaaaccaccaccacaaaagaggcagtaacattagtattacattatacatcttaggcatttttttcctttgcccttttcgtaggtttttgtttgtttgttttttcttgtcagccacttcatcatgtttggtctctcgtctttggctgtgtttttctgtttctagttattgtgggtgttaaaaatcactttaatgattcagcaataattaggaagtccctatttgtgggtgttactttactaactaccagggatgaaaaggcaggttttgctttgttattacgtcacagtttcgtcaaggagataagtacttaaattgcagtagagtgtgacagcatatgtcgacggtgtgagtgatatggaataagagtgagacagggaggcagggcaggctccaaaggcgaagagatgtctgagccaaattgaagggtaaactgagttcaccaggcaaactgaggaagggtactcaggctgaaggatcatgggaggggaggagcgtgagttcctcttaagtgaatataaaccagggggtaggaaacaacatgagatgaggctggcgagagagaaggatgctaggtgaggtgctgtggtgcgccagagactgcggaagtggctttctaattaagaaacagaagccaggaaactcctgtacttcaaggttttggagtgggaaagttgaggaaatgtaagagatcatctctgtctctatcacattaccgacggagaagtgggataagaactatgtgtgttttcacttcttctttctttagagaaaacaaatatcatctgccttgctaggtagttgtgagaaatgaggagataatatctttaaatctcctacggtgatacctggaacatgatggtgcttgggaaatgtctcttcttctgaaatgaggctgcctcgaagactcactggaacccaagcaaagtgtctctgcatttcactccgagccatcgacttctgttctgaatgttaaaatgcaggtggctgtgagggagtcttctgagtcatgccagcgtttaaggcgcttgctcttctttgtgcacattcctgcttttctcaaagcctattgaaagcaagggccatgtttgctgttttctttgacagaggaaattttttttttttttttgagaccgagtcttgctctgtcacccaggctggagtgcagtggtgcaatctcggctcactgcaacctccacctcccaagttcaagtgattctcctgcctcagcctcttgagtaggtgggactataggtgtgtgccagcatgcccggctagcttttgtatttttagtagagatggggtctcactatgttgcccaggctgacctcaaactcctgcagtacagtattgcaccttcctcggcctcccaaagtattggaatatccggtgtgagccactgcacctggcctccaacagaggatttcagtcaatgctgagcaccaattacagattgattgcctctgtgattccaggtaaataaccttgttgtggagctgagtctttcatcaaaaacaaggactcctggcagatgcccagaggcatttataagcagtcccatcacgaacaaattgccaaatgcaaggcctgaacaaaagacacagaaaggatttctttatcgtaagcacacttctctacattacctttacaatccaacaactctggtattagtaaattatagaaacaacttttgtaacactatcttgtttgcagagtatatgaaaaatttgaagttaaaattcagctccacgaatactgcagtggtgagaaaatggcgacaaagattagtcttctgtgagaagtctgctaattattcttcatttaataatgccatgtatgatggccttcattagaatgaattcttctcaacacctatgcctctttcacctcagacatgccttctaattttctttggtagtgtctgcccacccaggtggtaatttctggtcataagtctaatttagtagccagctaaaggatatctgtgaacccttcgcaaagagtaatctattgaaaaggaacaacaaaaaagtatatctgtgaacttattaaatgactttaatcatatgaaaatcagccatcagccttattagagtggttgattttttttttaatctaagagctttcttggttattttctgttcttaatcattgttgtatatccttaatgcgcaggacatgacaccgtataacaagtgttttaaaaatatttacaattctgatcttataaaggaaaaagttacatatggtcctttgaactaattgctaaaatgacactacattaattagataattaagggtcttgagcatgtggctattgtattcattgggctggaagccaaccttttctatagctgagaaaatgggttagcataattcaaaattcaattgctgtaccctttttcatatgaatagataatacagaatgagccttaaatctgggttggaaaaactaacaggaactggttttattttaattgagttttaaagcacttctaggccatctcattgtctttatagtttaaccctttgaagttgtgactgccaacgtgctagtcttgtcgtcttacacgttaatggtaatgatctttttagatttattgtgaacctctaggaatgttttttttaaccagtaaatgcactgaaacatggaatcaaagtctctttcccgtgggccccttttcattgggaataaatgctacccatagattgaagtagtttataccagtacattttttaggtgccttaacttaccaaggttatttgtcaggaaaattatctcttgtaacaccaggttccctacctttagatgacaggacttaatacaaaagttttccccataccaactagtagtgtaagttgatttcatatccttttatttcataaagttttgcttatcgggtttgtcatcctctatttgaaattaaaatgtgtggtctcgagatgaccttaaagtatctgacccccaaatctaatcactcctagcatctgtgaaaattgacaaatatgtcaggtataacttggggcatcaaaacattgttttaaatatttcgtttgtagacaaggcaaagatcattttcaggttagtcctctgagaaggaacgctgggtgcagaagcatctttggtttctctgctctataatcggcactcattatctatgggtttatacgagcagaaaatgtacagttatatgttcagcacaagtgaattattgattggatttacggccagaagaatgttcctaagtggtcaatacatggccaaagtgtgtcaggtgaaggtaaaaatcaagtaagatctatacttttgatagcaattgctgttggattatgttacgcttgtcatctgaggttactgttgaatatagataaaaatgttaattgtattaatttagacaagaatgtggcttcaatgagtatttcttacaaagtgggagtatcaatttttcttaaatgtagagatttagtttttcaaaaattatattttttatatgacctgacgttgattggcttgcctacattctcttttggtgtatgatgacagtttaaaaattcggatgcattttgcacagaattaagacgttatgtgcaatccttgtgtttctaattatatgttgatcaatgacacctttacaaaactgtcatcagtctattggtggttgattggtccaaccttagcccgatacctctatctccgcttagtcattcctggtgggtgactgatgacccctgcttaacagtaaacttgttatgcatagggttgttagaaaagtcttcatcaatttgagccaaactgtggctcccagctacttccatcaggggtccttattccaccctttgattgcaaaatgccctgaagacctggtatgtcttatgtcagttacaagaggcccttctagtgatgtaccgggaacctcctatgggaaccagagctctgctaattttggggacaagaaatgatgaaaagaagtgccttgttcttggggcatcacagtctcatgacagagtgcatgttgtcaaatgcgcgtttaatcttcttaagctcaacttcatgcaagagacctaggaattcacagagtgaagatgatttctccattcccttctccgagcagagctcttgaagaagatgggagttaggagaagtgaatcttttgttttcgaagcctttgtccttgtgagtctcttaattggggtgtcttgtaatgcaaagtctttaaagatgtgtgttcctgaaactcaggaggctgctctatcccatggttcaaccaaagaaccagggccaaagcagtgctgaaggaacaactgattctcttggccctccttagagtgagggtacaactggctccaaaggaaatgttggcacttccagagtaattctgacagtactcagatttgcttcatgtacccattctagaaccttacctactcaagtgtaagatgagatgccactgtggtatcttcaaaggaatttagaatcatgtcttaatggctccattaagaagaattctttttctcttttctctgaaaagcatcccaggtcataaaatgtaatgtgggattgtaggttttgtgggaagatgcacttggcagcaattccttgagaggaggccttgaaatgtcagggtcccccattcatcttcccaagctgggattgacccagtgataacataatgataatgcagctgctttcaatgtcaagccatcaggcagcgggttgggggggttgcttggcccaggaacccgtgccctgatgtggagttggtaatctagagggttttgagttaagtgcttttgacatggaaaatcaggagccaagggcgaagctgccttttaaatgctctttctgaaagagtccactgcagatgtaattgagcctctcaggtgaagagctttattcgagcaaagctggttagtgttgcatacctgtttgggggaatattttaggcatcctcacaaaactgctatgtgacattgctgaaggtccccagcctccttgctcccaaacacttcaagaaggaaaatgctgttgcagaaatgttgtctaagctttaccattcagtgtggcccagatcaacctgtcccttctttttgtgatcacagtgtgtaattataaagttatttgtgtgtttggtttatgtcttccacactggactgtaagatccatgagatctaggaccacgtctgtcttgatcatttctccttctctaagactaacacaaggcctggcataatcattgtcatcaccatcaccatagctagtatttattgccatatacagttatgtaaaacattgtaagaagtgctttacatcagttattcccaaccatggagtcatgagtcaaagatggtcaaattggccaagatgaaggtgtttgcattttggagaccaagcacttgaatccataaccccaagatgtgactttccaggcttgggatttcgcaacacgtcgcttaatctcttagcttacattttgtcatgagtaaaactgaaacagtaattcccatgtgctgagtttgctgtgaggattaaagacaaggactgttctaagcccggcatataacgggagcccattataagtgaactgaggtgttattttaatatataccttttaaagtttgagtgttaggcatgctgttgagtgaaagaagacagactgttaccagaggacatattctgttctatgataccacttgtgtaaacgtgaaaagcaggcaggaattttccatgtgagagaagtcagaatagcagttagcttaccagggggtggtgatcttaaaggggcaggaaggagccttgtggtatgctggaaattttccattcatctggtgatgtgatcacttggccgtgtgcacgtgtaaaagttcaagctatatgcttaatatttgtgcacgtcggtgcgtgtaagcaatatctcaaaacatttgagagaatttcccattcattgacagaatttttctcccgcctcggtcaaagcacacagtgggttttcccaacaactgaggtgcctgagggttgggtgccaaagaggcagaaaggccgagatgaccgcttgacctaattccctattcagctgaggcctccacccctggcctgttcaaaggcagttacggatcttttactcaaaacctgaacctaaaaagaaattctttagccatgtccgtgtgaactaaattcagcgtcagatgtacaaggctgtggttctgaccacccccgggctatttctgaccacaggacagcttaaatggtgtggcccataaaatgtaatctgcaaactcaggctgaatgttgatctatttagggccaagagaagaccaggccttggcagcagttctccctgaggtaggatcttaggtcgaatggagaccatcaccctggctgccagccccaggaggctggaaattcgttagcattctttatctttggggatcggccacttacttgtggggttgactcttacagcctttgaccacctcccaaaagctggattcactgatgggcccccaactcaactttcactggccaaagtacttggggttaatttagcaaaccccaggatccccagagggtccctcggtattgtggttttctcctcgcttccaccttatagtggctccaccaggacctcttgactcagccagcactccttctcaagtcacttcgcagcacaatccgtttgttgttgctgttgttttttcttttgttttgttttgggtttttttttttgtttttttttgttttttttgtttttttgcctaatttgtgcttggcttctccacagaggcctggttctggtcccttcccctgcaaccccaaggcagggggcagattcccgtatcatggtgctccttggcctgattctgtggcctttatattagaactcaccttctggaatcttttattgtcttgttctctcttccaagctgcgcatcttccttcccttcagaggtttggtgatcagcgtggtggctcgtttctataatcccagcagttttggaggccgagactcggggatcccttgagcccaggaggttagagaccagcctgggcaatatagcaagatgtcatctctaccaaaaaacaacaacaacaaacaaacagacaaacaaaattaggccaggtgtgatggcttatacctgtaatcccaacactttgggaggctgaggtgggaggattgtttgagccccggagttcaagactagcctgggcaacatagcgagaccctgtttcttaagaaaaaagaaacatttaattaaaaattcagaattggaagttgcattgagccaagatcatgccactgcatttcagcctgggtgacagagcaagattctgcctttaaaaagaaagaggtttggtgccaggacgccatgaaataattactctaggtaacctgaggctagacaaacctctccatgtctcagtttccttcctggcaaaatggggaggtaaggccagatttcttctcctttagttttgtttttctacttgaattctatttgtcatcctctgtacctaccacctgccagttgctgtattagatgctgttttactcattgtctaattgaattctccaacaaccttgcaatacgcttgttatctccattttagaaacgagaaaatggtgactcagattaagaaacttgctcaatgtaaccaagtcacaattttaatattaaaaataatgagcatttattaagtgcctgttgaatgtgtaggattttgctaaatctttcacataatctcatttcatctttatcatagcccttatggtgaaaatgccattattctttgacatagaggaattttgattcaggaaggttaagtaatgtgcccagtatcatctatgtataattgatgggtctataatttcagactcaggtttgtttaagtccaaaaatcatgccattatgactgtgtaccatgttgcatgccttcatatccccaatggaaaaatcccttctcccacttttcttaaccctacaagatatgccaagattctatagcatctgaatttgaaaacctctactaattcatgaggcaatctatttgataatggcatgatttagttagtgttccttttttagagataaagcctcaccctgttgcccaggctggagtgcagtggcgtgatcacagcccactgtagccttgacctcccaggctcaacctatcctcttacctcagcctcttgagtggctggaaccacaagcagatgccaccatgcctggctaactttttttttttttttttttttttgtagaaacagagtctctctatgttgcccaggcttgtcttgtactgggctcaagcaatcctcccatcttggcctcccacagtattgggattacaggtgtgagccactgcgtgaggcccagttagtattctttacatttttaaaataaaatttcagagaaagcaaccaaagggagcataactctgataagaataataaaaagaaacaattcagcaactctcttacagatttttatcatcatcccattcataattgattccaaacgtgcatgaatctttcaagataagtgtcttattgattatcctgaaaacaagcgatcacttggtgtcctgagattcgctcactgccctcccctgattaccgtaaacagagatgttgatgagaagaaatgtcactttctttggtgttggatccataggacattttgaggaattgggtgtggggagtggagggagtgaagtgacccagatagggaggtgcttgatggcttgactgtggccttcaccttgctttttgtggagctggatatagacatttgttggccagctaatactgtcttgatctgttatatgatccttaggccaggactttttcctggtaattgtgcaaaatgtcccagtgaatgccaattccttgctgtcaggaaacattaagtttcctaagtgacatcctttttctgcatgtttacttatggttatgtaaatcaagcgggcctccccattggaaatgatggcagtggttacaagggacttcacctggtcttttgtagttgtggcaaatagataagatacaaatgtgacctgcaattcagttcagcattatgaagctgtatctgctccctgggtggtggtcacagccctgctttgtggccctaacccttgccttcctgctggcgggccttgcacaggtgcagagagggggttagtattggcaagctaattggataaatggtgaagtttcccctgggtggctccattgctccaggtgaagctcttgaaatactctgtagatgacaatagcctcaaacttgaacaggttcttgcagttggcaaacagaaggagaccagactcataggttttgggtgcggataatggataatctggctattgcatttaattcccagcctgatttattgaggctgcctttggtgaaatattgatttatatcttggggggccaggatggggctactctgtactcagatgaggcttgctctcaggaagttcttgttcagcagcaaaaatctgccctgtttgggctctgaaagttatttttgtagtggcctcacaagtttcttgtagcaggtcatgaagaggaatgaaatactataatcacagagcttgcagaagctgcctggaggaccagttagtctattttttgtacatgaggatactgaggctcagagaaagtgaggtcattgagtcacttgagttcttgttgagtgttctttcctgctgaggtgtcctaggtgcctcttaatgcctttaacatctgctaagagtatgtcacttattgacgtagcatcactttattgagcagctactatgtaccaaacacttagcatatgctttttggcattaggagctgaacccagagtggtctctgtggagaggtgcaggtttacccagggtggtggtagtggtgatggggtggtagtgatagtgttgatagaagaagaggaggaggaggaacttctcaggaagaagtggcagttccctcctttgtttcttatctctactgtttagcagccactctccaaagcctcttgctgggaatgtggccatcatagaagtaaatgagacatctctttcatctgcaccaacctccttattaagaccttatcagttacctgtagattctcccactgttgtacttgtttctccctcaaccaattgtattttagctctcaagttttggcagggttgagtctagtatttctgttgggatccggggagcatatggagtgttgtttgttattttttagagtttcttattgcggtaagtgctcaggagggaacagagggagaaggatagaggaaaagcaaagcaaaacaaaatagaaaagcacaaatgaagaatatttagtccattctgtattagtcctccttgatggggggacacatgccagccaggttacctgattcatctagttgtgattttattgacagtcatttctaccttgttggtatccgcagaggttgtcttgaagggggctgatgccttctttcactagctttatgtggctggcagttctgtcctgccactcttttcctcatcatctcagcctccctgcccatggcactcaagagtccaccttggcagaacctgcaactcttcagcgcctccctaatgaactccttgcaagggcccttggttaagttacagtagagaagtggttgcttaagcaagtagtttccggtaaaggcataaagatagcccataattgggtgataaaatacctggattgcatctaaaaataaagacttgtgaaggtaaaactgtagcttacagtgtgcgactgtttaccttcttttggtttcttctcatttaataggttggtcatctctctgctggctttttcccccttttttctcccttctgtagaataacatgtggaccattaactatgatgctacttcttagctgcaaggggggaaaaatggaaaactccaggggaagagggtctttacttagggagttggcatttgttggaatttcccaagaacatttcatgattagtgacaggttatcttctagtttacctgaaggctatggtcactcaacaaattttgtgttgcttcttacgtgtcacgcactgtgataagtcctaggattatagaagtcaataagctatgatgcctatccttaaggagagaaacacatataggataggaaaatagcttgccatgtctgatagatattaggcattcagtctctctctctctctctgtttattatagatagaaataaaaaaattataaatagaaatttatttctcgtggttctagaggctggaaaattcaagatcaagatgcagacaggcttggtgtctggtgagggctgctttctatccttcaaaaaggcaccacgttgctgtgtccttatttggtggaagcaagtgtgttgaatattctaagaggaatctgaaagtgttatagtattaaggaagacagatccaagatggtggcaatggtcaagaagggtgcgggaagaacccttcaactctaatattatttgagctgctcactgataaataaataggattttcccagttggggaagagggaaaggtttttagggagcagattagacaagaaacattgaaaacacaaagtgtatttcttgatacttgttaacactaggtgttgaggagacataaccaagttctcctgcagtttgtgtgttaaggcagatggaaatgtcttgtaactcagtaaaacagtttagaaatttaaagcctttggagagagtaagtattgagaaggcacatctctacgttgttgacgtgaaggagttgcaaggtcgggtagatgggatcagtgccaggtctaatgggcttcatttgcaagacctaatttctagcagatcatggtgtaagcctcaaatgggaggtgtgcctgggatggttgcagaggagttgttaagagctcagactccagcgtttagacaacaccagctgctacaaaggacactgtgcatttctaaatctgagtttctgcacacgtatggaggagtaatatggcacctcctcatttggttgagatgctctggggtacacgtacaaggcgctcaactcacggtggctccaccagtatgaaaatgtgttatctgccctagtctgaagtacagaagtcaggtggtgagaggtgacatgccatgatgtggttctgcttctctgagattgtctgtcagcttttccctcagtttcacccccctttctccctttttcaagatggttttagcacttccagacattataaccagatagcctattgctagagaacaaagcaccttctcttcctatatgtacctcttgggaacaagggaacctttccccaaagcccctcaacacacttaggctgacatctccttgaccagaactgtatcaaatttacatagcctcaaatgaagcatctgggaccaccaggattgggtgtttaggccatggaagagtaacagcccagtacacaactgtctccagtggccagcacgtagaccttccctcacactttccactctctgcatcccctcttccctctcatgtatctctattacatggagcctcactttatagtcctcattaagagactgtggggtggtagacagataacaatgttaacatcaggcaaatgggttttggatttaggttaccatcatttatcttctctgtaaccttagacgagttgcttgagttctctgagtctcagctgaccaagctctaaaatgagcataaccatatcagtttgtgtttcctgttacagggagaaaagactgagataactaaagtacctgattgagtaactgctctctgaaggtggaggctggactgcttcactggacagggtggcctggggttattctagtgcagtggtagctggtgacaaaactcaaagaagatgtaactagagaaaaggtactcagtgcagcctctgtgagctaccaccactgcctctagttttccagaaaaccaccactgaccactctctgtacagatgcgctcaagcgaccataaccaccagtgttcctaacaatgcgcctattgacttcttatttcaatagatatccagattgattatccctcaaggtaagcatcgattttacctttgtctcagtcaatatttacctctgaggtcaatacgtgtggatattcacctcagctgcagtcaatatccatttcgtattacaatatatgatgtgcatatgtgaaaataaagaacagcatggtacaaaaaaggtctgctaggcaaagaagctttttgcaaagcggatgtgtttttgttttattttttgtttgtttgtttttactgtgtcactttttagaggtcagattctatttcactaaataggacatatgtgtcttctgccaagatgtggaattttggcaaggctagcatgataacaaataaacattcaagcagtcacttaatgatattgaattgaacaccatttctcagaagttcctgtattaaattacaaccataagaacatacacaagcatgcagattgtaagtgtgatgagaatggaaacattccataggacgcagagttattcctcaagcccctggactcgcagagaatcaggtgtatgaagcaagaggaagaagacaagaatcaggaggcaaagagaaggaggaagaagcctcagtggggttgcttctttttatttcttagagccagagctggaagacaaggcctggcatattttggcaggcctggatcagagcctaggtgtgtaaattaggaattgcatttcgctgctgctaacaaggacccaaacatggtggtaaattcttccacataaaacaacagaaaataagttgttttctggccctgggctggggtggccactccaccgtcatcgatgatccgggctccttttctctttctgctttgtgacattgcttctatcttcatgataactcgctgcccagaatgaccaggcagcatgaaaacgaaaaggtggagagggaactaacttcttcccttttgaagagctttctaagaagccccacccaacactactgcttctctcccagtggtggtgatttagttgcttgagcacagatagctgccagggaggctggaaagtacagccttcagtcctagcaccaatgtgtctaggcaaatacaaaagctctttagccaaggaagaaatgacaacgaatatttgggacccactgggagtttgtgccaaaccaggtgtcattgccctccccaccctaccttgctcccctggagtgtatcctgattcttttgaggatcacttgatcctgattttttttttatgtgtatagatgggatttcattatattgcccagactggtcttaaactcctggcctcaagcaatccagccacctcggcctcccaaagtgctgggattataggcttgaaccaccatccctggccttgatactgatattttattgtcctaactgacagttttgtctgcccagcattttcccccatcacccttgtactatcccattttcctttgccatgcacctgtcttcctcttcaggattgatcacaaaatcaaaaccattcctaccagccagaggtgggcacatgacccaggtcagaccagtcacagttcctgattcccggccacagtgcatgatgggggaatgagcatatatcaaaccaggacagtccaagtccttccggggactttgctgccacagttgacagggggaggtatttgcataacttcaccacacacagctaagctggtgatcctgctgcttggcagcatcttcccagcgtacaacagaggaaaactgcctgttgtagttaaaaaaaaaaagagagagagagagagagagactgatacacaaagagaatcagaaaggagtagagatgaaacaaagatagagctagcatgattgcaagctgaggacatacgaggagtccctgggtcagctgggccatacatttgtaagctgtagacaaacaaaaatgatctttgggttccttctttagcaattggagttggaggaggatgaccttagtttgcgtctttgtcccactatcattatatccaacttgtgtaattagaaacactatttaagtctcagtttcgtctcctgtcaattgggaaaatatcgtgaggcggagatgtgagatgtgatcacgtttataaagtctgcggcaagaggatgataaagtcacttctcaactccttctcaactcctcctcctggcttattaatgcccatcctttaacctgtcctctgctttatctcttggaatccttagggcctttttaaccccatatacgaagcaaacctatgtgtatgtgtttgtgtgtgcatcaattcatatggtcctctgcagccttgcaaagtcgattcctgacatttccgtagactgttttttttgttttcagcaatactctccagcagcaaaacccaatccgctcatattcttgcatttgctgcagcaaaacctgacctctctttgtgttacctgagtcttgacgaagaagactgaggaaaggccccccccccccccccgccaaattgtcccgttgtctcttggctggtcttgccagctggcacacagcttcctctgaccaccctgctaggtacaaatcccacatgaaaagtctcaatcacctggctcaaactcatagttttcaggtggcataagccatggcattttcacctcctttcctggttgtttccagaaagggatgatagccccagtgcagtggctctgtatttctcagggcagcgtgggacctcagggtttgtcatggaccacacctttctcctttgtccctttttataactcataggctacctccaacttgacacttatttaagtttttatttattttatttagcattcagaaaactctatagcctcagtctctcgggatgtaaattaaagcaatttcattttcatagtttctctgtttcaaatccctcattgtttatttaaatagcagcctatgcatattgcaagtaaagaattataattaagagaaccagaagggcctgtctctcaggaaagcagtgatttcctttcacaataaccctatccttactgttgaagacttgtggaaaagggacatggcccagggaaccagagtggtttgggaaagcactttgtcaagaggcttggggaccccagggtggaagctgccatgcgcatgaggctgtgttagcagaggcagtggcagaagaagacattgcaaacctgcaaaagcaacctctgaggatgggtagacatatacttcattgcaggcagctgctgctgaaatagatttggagtcagatgtcatattcctgccagcaggtttagcagtcgtgggactagggaagtggcaatggcaggagcaactggaaatgtctttttttttttcctcctttttcctgaatatggaaccaaagcctgtgtttttcttgctcacatgtgagtcttctccttgcttcaaccctccccgctgacagccacaagactcctgcctccctgcagcctgtggaacgtaatattcgttgggatcatacattgaccaaagatccgccatgtctttgcaactaacatactcactcatgacttcacgtggctatgtacaagaccacatctctcaatggtgaggtcctcaatctctccctccccaccacagttagctatcagagatatacggtgtccttaagatagggcaggcagggccacctgccccccagctgaccagtgtggatgtcttgatgatgagccatactcagagtggccctaggatggctcctcagatagctgctggcagaaacctgcactcagtacatctatacatggtgtaatgattgactcaagataattagcatagccatcatctcaaacctttattatttgtgatgagaagattcaaaacccgctttttgaactgttctgaaatatgcaataccttgttgttaactgtattcacctttctgtgcaacagggcaccagaatttatttttgctatctaaaatatcaattaaaaatacaataaaactaaaaagaaacctgaactcaggagagtggaaaagaacttcaacattcaaaggggataagacatatactcagagtgggaaaaatactaaatggtaggaagatgagaagttttttactctttgttgtttctgctcattttttatattcaaaatttctaatcatgtgtgactatatatgtattatacatggtaggacttatttttttaatgtgaaagaatataaaacaaaatacgatattatcttttgagtgatatcaacaaaacaaaacatgatatccaaagtcaccctgtatggttggatactttgggtttgccatcttttcttttgttcatttgtttcatgcaatagaaacgttttgagatcctgtctggctgggttctgctaggcctgggtctacagcagtttgctgtcaaggtcttggcccttcaagagcatgtagtgtggtggggaaggtgtacatcagtgaagaggtaatccaggtcacggtgggatgacacaggctgctgtggcaacccacagcaggaatagccagtcctgccccagcagggcgtatcaggggtgctaaggtgacttccaagattgaggttggcgagatcgtgacaggtgtgcaagatggggtgttccaagactggggacaggacaggtgtgcaaggaccagccagctgaggtagaggaaacctagacctatggaacatgctgatttcaaggtccatttgtggggagaacacggactgtgtcattggaagccagcagggagaatcagttgagaggtaagccgggcctagtagaaagtaagcgaagccctttcattaagtgaacgaagggtgcatggtgagtacacagccatgaaaataaaatgatataaatcagcacggtttcagctgccctcatctttctactgtgatctcagcagtgatggggctggctttgagggttggagatcacacacacacaatcagccagctctccaaagcaagccccacactctcttgatgctatcctcaataaacatgcggtctaaacagtaaccatgttctagctatgcagatgcagtttaaagacaaatcctttgagcctccagcatgcgatcccctcccaatctcattgctgctcccctaccctcttctgcgtagaagcgctggagccaggtgcttacgacctgggtgctagtatctttgtgaaaactgctcctgacctattgctttgtttattttagccggtgcctttgtagagggaaaacagcttagcaagcatttagtaggtagatccaaagtccccaggagctgttgggaagtccataggtgctgtttccattgctttttcattccttcatatattaatcaaggagtcagtcaatcaattaaacggatactattagcacctactgtgtgccgggcactgtacttggggccatatgcactgctgattcattcatttggattctacggtggctctttacccattgccatcattttgtaggcagtgagtgcccgcatcagtgggcgttttatgttgcaccattttctgagcaatgtctttggtccaccattaagcatttgtggccgcccaccccacaatatgctttgctttctgctttcagaaacaatactggtgacctgttttaagaaaagctgaaaagccaggacttagatttttctggaaaccttcaaattaacctcattaagtttaaaattgtttttttctcgttcatctctcttgcttttatgctttccaaacccctaaattgtggtgcctcagtgatcttctataacataagttgatagtcaataattgcttaatgggaatcataaatatgagtttatttatatgtgtatatatatatatatatataaaatatatttccatgaatatactgaatgctaagccctccccactttttttttcttttttaaattcagaaatttctagttgtgtttattcccctcgtcagcatactttatcatatcagagccttttcagacactgtaaaactactgagttatgtttgggtcatgttttgcggtatgccctttaatagtgtagctttagaaatgcaattttcagcctctgcttattagaatatgataaagtattcctggtctatgtccagctccactaatctccagactgcgcttcatgaattaagcatgaagattttagtcaatgtgctttcaaagaccaatgtttagggaatcatggattttctacaagctgagggagaaatctataataggaggaactgattttcaaacatcatattctcaagaagaaatgaccacttctggcccagaaacagaaaatatttcactatcagaattttctagaaccagttaaaaccacattgtgctgttaggtttaataaacggattgtgttttaagatgtgtaagactgtctgtcacgtgggaggatttcaaatgactgcttattttggaaagctcatgtagactgggttaaaatcgagaggggaatgcaaattgaatttataaggtattattaacttcttcctctttccccccgccctggcccctgtgcattttggttcattttgctctgatacaattcagcaaatagccagatatttcttgccatggcgagagcttagttgggggagagattttgaccaggcaggctctcaggtcggtgccatcggtgacgccaacacacctcctggcttggtgtgttttgtggcatttggcaggcaaacgttttgaaaagaaatctcctttcaaaaatcacagcactggttgaagcaggagcatctctccccttaaatgcaaaaggagttaatatgccagtgactacagtgtgcctggaaaggtcactggaggcatttttgtctggggcagcccctggagtcttggcttttgtgcttggtgagaccttatctggcctcttcattgtccccttcatacaaatagatagcttttagtgagcagctactctgcctggcactgttctaaacacatgacaccaatagctcactcagattcccgcctctcaacagggaaactgaagcacaggaagtttcagtgatgcacttaggcaaccagtaagtggcagggtcggcattgaggtcaagactggttggacccctaagtttgaacaatcaaactggactttggggctcacagtttgtttcatgtcaggaaggtgtccgatcagaacctgaatgccagctcaagctgctctcagctaaactccaggggttgctgatggagacttcatcccctcctccagtcccgggatcaagacagaaatgtaaatcacctccaagaatgggtctgcgtcttgcacattttccttttgagaaagaggaaaattctcagctggtctagctttgtctgtgaacctccgggatctctcaggggctttaaattaattaatcaatccacagacattgaactgaatctccaccttgggcttgagactctgcaaagtgcattaaatgggaaggaaaccaaagggcctgctgccctgcccccgccatagcctaaggctgtggccatggctggggaattggcctgtcagttcaatcaggcagcccctctgactggtgtttttcactaagctggccccatggatggccctggtcatgtgtagacatggcctcaggagggccacattcctctcatttccaggcctccccacttaattgttcctgacacagtttggggagaaatgcagcaaaacccaggcctgccaatcaacatttgctcccgagtctcagagcggcccctgaagagacaggttggaccaagggacatccacagatgccttgtgtttaggaagtggggtgtgggcaacagagggagaattgttacccccgggagactgggggtgctgaagaagagtctcagtctctgcactctgggtcttgccaaaacctctgggattgggtgtggtgtccatgttgaggaagggacagtgagctctctaaatgacagtgggtcaaccaccgcatttctaggactcaaagatgccgtgggggtgtattagtctgtttccttgctgttgataaacacatacctgaggctgcataatttatgcaggaaagaggcttagtggactcacagctccacatggctggggaggcctcacaaccatggtggaaggcaaggaggagcaaagtcatatcttacatggttggcagcaggcaaagagtgagcttgtgcagggaaactcccccttataaaaccatcagatctcgtgagacttgttcactatcacgagtaaagcacaggaaagacttgccctcatgattcagttacgttccaccggggccctcccacaacacatgggaattgtgggagcgacagttcaagatgagatttggatagggacacagccaaaccatatcacagggtcacctgtaggttaccgtaaataagagaaacagaccaagtagagactcagcatagctggagggggggccccagatgacggaaacagccccccagctccagccatttgttactgggttgtttccaacagaatcaaggactcggatttttatgtgaagtcatctccattttaagtattcttttctttccccccaaccctccgtgggttaaagcatccatgtttacagaatgaaagatgagggcaggataccacttctcctagggatcatcatcattttgtggggctatagtccagagaggtgaaggacccatcttgtgactgcacagctaccctgtggcatgactgagactataatcttctggattcttcaggaaaccctggtagctgatgaaactgccctagaacgacagcaagacaatagggccatgaaagcataagccctgaagtctggacactgagagaattctaggcttgacttctctgtacagccatcttgggagtgctcaaccctttgaatcggatgtctagaatggactcagatgtcactgtgcaggtgactcacgcctagaatcctctgcctatcgtgacagggagaagcctgtgtgaccctgtggccatctcagtctctgcagggcatctgtagctttggaggtacctgggcaagagactgcctttcctactagagcttctgccatccctctgtcactatttaaagcattgcctgcaccctcaacctcgttcagtttccacataatacctggggcagggatgtaaataccctgattttatgtgtcaggccttcaggactcagggtgtataagtgacatggctcctcgcacagcagggatggagaggcaaacccaggttggcctctctgccactcatatagaactcctttatcaccaagattcctttcttcttcagtgccacctgccttattttactcacccagaaggaagccgggtccctctttgcccctttgggtgtttgtgaaaagcaagttgcaaactctgaattctataaactgttggagacagattctggagagacactcaggcttagctctagaaagaaacgggtaagacagaggaggttcagggcaactgtgttgccttccttgactggtgcatgggaattccccagcagagagaaaaaaaaaaaagaaaggaaaaaaaccagaaaggagaatagaatctattatctccaagccattattcacacacacataccccaccgccattttccaaattgtaaggtctttttatataagcactttccgttaaaggggaagaaatagctttacccgtggtgtaaaatatatactttctaatgtaaatcaagaagctatgaataccataataagaatgtggtagtatattaattgatggaaattgtagagtggaatattcataatcagcagaagtcttttctctggaaggaacaaaggattaagttagggagacagtaatggtattgttagcaggctatttcaatgattttctctgcggaagagtagggaaaggtgacattccaactgggaatattcgactctgcagatccctactcggagtttttcagccctgttttaagtgccgagctgggttttgcctcatgatccaattgttttattagcgaaatcatcatctgtttcattttgctttggtaatagtgcagtgtctgtctaacaataaattatagagtcaggcaaacaatggtttcgtattagggatataatgaaatatcttattaaaatgcagacttccttaggttcctgaaattagagtcttattttaaaatgattctgttgggcttattacacgcttttgaactaatcacactagtagaatctctctttagtcagagcatagaggactgtgagagttacctcttacttcagtattttcccattcgtattttattctcctgttctcttctggatagatctggatagattttttttagacagagtctcgatctgacagccagactggagtgcagtggtgtaatctcggcttactgcaaccttcacctcctaggttccagcgattctcctgcctcagcctcctgagtagctgggactaaaggcacgtgccaccactcctggctaattttttatatttttagtggagacggggtttcactatattggccaggctgatctcgaactcctgcccttgtgatccacccacctcggcctctcaaagtgctgggattacaggtgctagccaccacacccggcctcttctcgatagatcttatttggctgacaacgaaagctgttgtgctggtagcatcatccctttccatgcaaaagataaactgaaatctaaagtagccatatccttccggccaggtttttcaagtggttactctgttctgatcattgtcatgacaggaatagtgaaaataacaataaatcatttttctttaacgatccatttactgtatgctgggcactgcacaaaatggtttacatggtttatcttgtagcgttccatttaagtctgctaagagtagatgctatcattctctccattttacagataagaaaattgaggcttagagaaattgagtaatttttgccaatcctgagacttgaatctccgctctgtcttctgcatacactttttacttgtcattgctgattagctttctctttccatctccctgatcagaaccattctgcgttcttagattcaacaaaatgtaatactccaccttgccagtatctagcgtgttttcagaaattgtgaacggggtggaggtggagtactaactgcaatcagatgttttatttgtttatttatttttccttcttgcgttgctcttaagcccccactcttgggcaaggctctgtgctatgctgttttatgcacatcatcttctaacagcttctctgccacacctggagaagtgccaatatcattttcatggcacagataaggcattggatgctcatagtttaagtcatcaggtggtgactggaggagccagaaggtccctttgggcctgtcctctcaccagcatcaactgcaccaaaaagatctcattctgagtatcagggatgaacgcccccactgggtgatcaggcaaactacatgcattttaaaaaactatatcctgctgggtgcagtgcctcatgcctgcaatcccagcattttgggaggttgaggaggacggattacttgaggccaggagttcgagaccagcctggccaacatggtgaaaccccatctcacctaaaaataaaaaattagctgggcgtggtggcagccacctgtagtcccagctactcaggagactgaggcaggagaatcgcttgaacccaggaggaggaggttgcagtgaactaagattgtgccactgcactccaacctgggcaacagagtgagacactctcaaaataagtaaataaatataaaataaaataaaaaatatgtcctgtaatgaaattgaaagagaacactttgtttcttatctagttggaacaagtggggtggggacagacaagtgactgaccactctccatctgactcagtgtcagtagactctctcaaaaattagaagctggctgacatagtggctcacacctgtaatcccagcacttcaggaggctgacgtgggaggattgcttgagcctaggagttcaagatcagcctgggtaacatagggaaacccttctactacaagacatagaagaaaattagttggccatggtggcacacacctatagtcccagctactaaggaggctgaggcggtaggatcgcttgagcccgggaggtggaggctgcagtgagctgtgatcacgccactgaattctagcctgggtgaccgagaccttgtctaaaaaataaataaataaataaaattagaatctgaattttgaagacacaaattcagatgcatgtggatgggcccaaaatactttgtttacatgtactccaaatgtaactcctggggcacccttccttattttctctaccacaccaatgccttcatggtcttacatcttgtcctcttaaccctgacttctctagccctcatgaatgctttagtgtggcagatgttactgtacatgggccctcgtttattcagcaaatattcatggagcccttgtaccaagcacggtgctgagtgatgctgtgagggtgagcaaaagagaattgtcatctgttaaatcccagaggtccgtctgtgacaaaactttcaccattcttttgtaaaaattagaaaaatacaaaatagtgagtttttcatgagctacgttgtatcaattttaaagtatttcttttaggattctattatttaccctttttcttcaatgttaaataccatttcctttaataaagatttaaaaaagattccttccttccttcccccctccctccttcccccctccctccttcccccctccctccttcccccctccctccttcccccctccctccttcccccctccctccttcccccctccctccttcccccctccctccttcccccctccctccttcctccctccctccttcccttcctccctccctccttcccccctccctccctccttcccttcctccctccctccttcccttcctccctccctccttcccttcctccctccctccctccctgtcttcttccctccctccctcccttctttccttcctttctttccttcctttctttccttcctccctccctcactccctccttccctttttccctccctctctcccttcctcccttcttttctttcctttttaaatgctgattttgttttctttttaaagccctcagttggcaaacttaaaagttgttaagtctgtgttagcctggctagctttttttttctctactagaccttcaaagtctaggaatgcctgatgtatctgtatcctgtgagtttgccacttcatgatatttgatatgtcattgtttccccataattttttcattgttagcgttgtctctccagcctcctgcttcctcttcctctgtctccctcatggtgtgtcttgctcaggcatgtcttatataatcaatatttagtgatttgacttcttaagtccttaaaaaaaaaaaaatccaggtgcaaaacacaaagacagggctcatgtcaagggagggaacctcgctcttctactctcagtgaaagaaaggcaagaccactccagcctattttttttttctttcccttggcccttgtcaaaagggtagccagttttctgttaccattgtgctaactgaagaatggaaaatatgcccagagtttaaaaaaaatcaaccaatgcctgccctttctagagcaacctaattaacaacccaaatgttaaaatttctttatttagaaactcagctatccagaattacaactccgcctctcgtgcttggaggcatagttctttgtcatattcctgagtgtctacagatgatgaaaatagccagttatctttgcccttcatggaaaggataggaagaagctctgatgaagcaatgttggggcactcatggttaaattgaacctttcccctggttaagtggagtgtgtgtgtgtgttgttctttttttccagcaccatatttggccctataattaatatgcaagttcaaatacctcttgcatggagcaagaagctgaaacatgcgcatttgtaatagactcagcatctgaattgaatgggcagctttggctggagtagtactgcagcttctcgaatgcctattgtcaaaatatatactagttaggagacacattctgctacgagggatgccctcccaaattaaagacactgttcagtttacgcttaacatttatggctatcaaactactagtccacaaccaatcatcatggtttcgttaacacagtcaaaatttaccactgggctattattaaaacttaatataattaatgtaaaaacacatacttcttttcaacaaaaactggctctctttgtagtctcttttttaatttggtgcaatcacttaaaaagtttagcacatttaaaattttacatcattttaaaattgtttctcttttataagaaggatgctatttactattaatgtagaagtacaaaggaaacggttactttggatttattcttttggaaaattagaatgtgggctacatgcttttcagaagttgatgaccaagagaagaaagaaagaaaaaaaaaagggtgcttgatgccctgctcctgctatgtccgggaatttcttgtacccttcatatgagcccctctgaacaaaagcaaatcctgttgacctgtcagcttaaaaagacaagaaatatgccacattccgcaggaataaggagaaaagaatggtgcgaaaatcagtgacacgaagttgaatatgtgaacacatccagacaaatgtgaagccagcccgattaggacgactgaaagggcatttccccagaattgcagttttttttttttttttttttttttaaataggggacgctattgtcattcagaaagccacaggctgttctgaaaacaggcaaaaatcaatagcccacttgttgaggataagtgaattagcctgtgttgaatgtaactgagtacctgaacacttgagtgggcagggattgttggggagaaaagacaattgtcttttatgtccacagcggttcacatcgctgattaattatgtccaatgatcatttttgtgcaggactaatgggcagactctgtttttgtttttgtctgtctgcccacaacctggtgaactgaatagagttccccacttctcagaacaatgcaaatggtggccaaggggctgtggaagagttgccagaaatggaatgattcagattggatgaaaagttgattttattaattagttaaaatacaaaatgagaaaacagaaaacacaataaatacacagttaataaaatacttcatattttattataaaaacattaattactttaataaagcggtttatattttcaaatacaatatttaataaactatattaaaaatatatacaaaatagttgtaagaatcggggctcctgtgagtacgtaaatgaaatacgcttacatcatttacttctcttcccttttgtttgtgagtccagagacgatggaagagtttggaaagttgtcagcttatctttgcatatatttgtccaatgataattaagcacaaattgtttcaaaaatctttcaaaaattgttataaagatttttattggtgctaagggctgtaatttagcaaagtcttacacctgaaaccaaccaaagggtcttagagtgtgaactgttgtcttagacccggagaagtctccaaagaatgaccatccgaggcattcagctggcgtaagaggagtgactcatttgttcttcttttttttttttttggctgtctacagagaaggaggatataggggcccttaagagaaaaactggagtagggtgtgtgtgtgtttgttttggtcaagggcagagtgtgctgtgtcagggtgtttcattgcattttcatatttgtcatttctctttggagcgtgtcttttggtgccacggaaaagggctggattttctatcgggtacaataggtacctgcagggcttagggtacaagagcttgtcggggacctgcacacatgtttgagacctgtaaaaatattgctggctctgaattatggaaagaaaatcgcaaagttaaaatctatcaaagtataattaaatacctacaaaacataatattatgtcactagtcaaccgcaacacaaatcttatatcattagatttcagtgatattgaatgtgggagatggaaccattttagtgcatttgatatgatgtgatgtggctttctccaagcctgagagtgcctgaaacccagagaggtcgtacgttgaccatgccacggggcccttcctggtaaatctaagcagaaatacaccatgcatgagacagaacaaagaaaagaactgtgaaaatacactcaggaccaggatgctgatacagtcatgaggttcagcttaaaaggccagtttctctactgcagaataatgaggtctatcctgttttgctttctttcaaagcccttaccatttatgaaaccagattgcaagtctgtttgaatcccccaaatgcctgtgctacataactgtctccttactctgtgctcttgccccaggcagagtggaagttgccttataaagctgcgacttggccacagtgttttccctttcagcagggaaaccggagttctccctgctgttgggaggttcaagagccactctgtgcagaaatgcccagaaagagttaagtgaggtaagttcgtcagacttctgcagacccatactgtggaagggtcaagtgcagggtcaccaacccgttccatcttcctgtcagttggcgtccacccttggtttcaaagggaacaggcattactgacatgacgggacctttacagttcccagctgctcatttggagtactgcggacccaggacaactaaagccggggtcgcctgccctccaggggttcctgggttgaagtatctgttccctccctttattttttctagcctttatagaaatgacaaagggtcaggtggtcttaaattccaaatctgggcacatgaatggtctgacctcggaaacttcctatatgctcgaaacgatttaactagcagcaataaaatctctactctttttatgacaaataatctagcatgtctggggagcatatttgattcttcatatttgggacccttttttaaaggctgagttttattaaaatgatagaaaaattagttattaaacagtatgtcaaatacctttctgtcccaccagatttatttttaaagacaaacattacagaggggcaggggaaggttatatttgaaatctttctatcctttctctaaaatatatttggtgaaaactaggaagtgttgatagatatcattgtttcctgacaggtttttggtgtttgcatcttgaaagtaaaactgccaagttatttttttgttctggtttttgttttttaagcttttctttgataacctcattttcaaggggaggcttagcactgatgtattttattttcttgctcagagaggaaacactgaaatagctatatgcttccccaccaggagagtggaagaatcttgcttttaaagcgatagtcctattttctaagtaaaagtccaggcatgtgacttaaaaaagaaaaaaaaaaatgttttctggtcaagtcacatgcctctgaggtttttttttttctttctttcttttctttttttttctttttcccagactcctcatacccctcctaggagacagtgattccctggcttcaccaggcaggctcttgggggcttcctggtccctgtcactcttaaaatgcagcctgtctttggacatctactccaagtttgcattctgccttgccttgtcagtctgggctatcaaaaatatagtttcgtttggaaaacaaaggggtgaggtgggtccaaagtacaggaagctataccatgcaaatgaaaatattttttccaaagctatctgctaatccctgtgatttaaaaatgtgcgtgtttttagtttctgtctaatttcaaccttttcttgctttagtgattaattaccaggtttctctattaagagcttgtgcgtgtgtagggggtagcatagaataaacaggctcagagcccccacccccacccccctttaagtaacagtgacgcaaacgacctttatttagcagaaggtagctctgcgaatccgctgaatgtccgattgcgatctcgctggaaagactgctgcttcagcaaggtttctttgctggtctgtggcaaggtccctgcttcattttcaaggtgtcctcacttggtgcctttgaagggtttttaatggattcgcttgatataccttccaaatggagtactttgtgcgttaattcagtttgtgataaagatcccttttaccctccttttcataattcttcccagagatatgaagtacactagaaggttagatgtggcatttaatttttccacaaaacctatccatagagggggaaaaaaagattcaatttcattactattcatgtgtaagaatattgaaggtggtatactaaaggagataactatttcttcttctatcaaaggaagaacaaatctgtctttgaacgaggagctcaattcttatttaaaagataaaaggtcacctacaatactcattcctttaaagctatagtgttggggtgggaaggaagctgtcttacctggacatattaattttaaattttgcttgaaaaaattgctcagtgcatttattgactagtctctctgtgtgagttctgaaagtctgtttatatctgttgccccttctcctaaagtgaacccagatatgtgggtatggggtgctagtttttatattaggtctgagatgtggaaaacagaaatctaacttagggatgtatcataatcaaaccgtcggggctaatggcatggctctgatattataaaatctggaggtttggaatgcagcaaactctgggggcattatcattattattattaatagtttgtatttacaaatgtggcattaagtagaacaacgtattcttgcaattaatgacaggaagcctacaatttctcattaagcacaggacagtgagaacgaacggaatttcagagacatgtttcttaacattaaaaacaacaaaaacaacaacaacaacaaaaaaccaagtaggaagcaggcagagttgcaatatgaagaacaatttcaatcatatgttgtttaattgagtttaacaagtaaatgtatatcccagtgtgtgtggtcaccaaagcataatgacaagttgttcatcatttaattagagatttgcttattgaaacgactgaaataggtagttgaaattttgcccttggacaagggagtaatttgtgatttgctacgttcatttcgtgagacttttggtgaaagacatctccttctcatatgtttaggcaagcgttgatgacatcaacctagccttttattttaaatcccctgtcaacgcaattagataatacaaaaataacaaaactacaggaggttgaggatggggctgggggccaaggagattacttggtttgaaatgaataaattgtctatcctaagggaattctttggtgcattttattgtgtgaaatgagcctggtcatatgactgccctgcctccctggaggcctccctgccctcctccttcccacagacacttatgggaggtactggccagctctgtatggccagtactgccctaagcaagaccaagaagcttagtctcaatttcagagagttattttggcaacatatttgggaaaatgatagttagatgctgcgttagccagcctctgcatgattttttacgcagaacaaacagttccaaatatcagtgctttcagcaactcatatatttctcacttatggtgcatgtcgctgatggttggctgctgctctgatctcactccagtatcagcttcagtcaaggaacgtattgttgtcaaggaaaggaaaaagaacagtggtgagaccaaaggatcttaaagtttctactttggaaggggcgtggcattgcttctctcattccattggctgaagcaaatcatgtatacaagccagaagccaatgagctataggaagggtagcaaagaacagaacagccatacagcctagcccacagatggggtcaagaagattcaataggcattggctgaagacttaagacttctcaagcaagttggatcctggtgtgcacctggcatatcctttaggattctttagtgttggtagattgagatggaaatgaggaaacttgtattacctactcctttgggccagaatttgcttacagcacagtgaggaggtattctttggagagcactgtttcccaagagtgattctaacaaagaggtgtaaatggacaagaatgaaaagcaattgcaagggcccttgaaggtttgtgaaggatggcaaagtgacttggatgttgatttctaaaggaggtaaaacttgaaggtagacaagctctttgtgtccatacatttgatgggtcatcctatgaaggagggcccatctcttacggcaggcagcgtggcgtaggcctcagagtcaggcatctggggcccagccttttctctgcaggtgcgggtggctcttggcacatgatgtaggtttttgtttttgttttgttttgtagacagagctcaatcttttgcctaggccatagtgcagtgtacaatcagatttcattgcagcctggaactcatgggctcaagcattcctcccacatcagcctgccaagtaggactacagttgtgcactaccacacctggctatttttaattttagtttctgtagagacagagacttgctgtgttgcccaggctggtctcaaactcctggcctctcaagccatcctccagcctcagcctcccaaagtgctgggattacaggcatgagccaccccacccagcccatgttaattttttcacctacaaaatgaaggctacaatatttactttgcaggattgctgtaaggattagaaccaccgtctctaaggcattcagcatagtcccttagggtaacatgagtgctcaagaaatagtaaattttagtatgtgtctcatttttttccagatgctctggggtcactaccaaccttgcctttcaccctacctgtggatctatgaccctgtccttctcagaacaccactcagtacttctgggttccccaagaggtgcctcttgagagtttgtaggaaactgtgctttagtaactcatggtttctgccctcagcttctcttgcatggggccttcctgcttgctcctctgctcacaatgacaagtgaggactcccctccatgccttttgatgctggtgcccatcaccccgatcacatgaacgtctatgcccaggtcccatttcctgacattcccaacatctctaccttctccgggcctagggcagggatcactctttcagaaacatgagcgtatggaagccccagtgtgttccttgaagtcccgatgcgtgatttgtccccatgctgtgtcgcacttggtcatctggaccctggggttgcctgagtgtccctgttacaaggcccctcctgaaaccagattggtgtctatgagggtcatctgggaaacctacctctggcagaatcgctgtcctgccagtttcctctcccccttacaagggacatttatgctttctccctctacaaaacctgcatgcaaattatctgatggaattgacccatagtgggtgttctccactggttcaacacacctgaattccggattcaagatgcaatcaccactactgttgttgtgtaagtattgctagagatggctgcagaatacctgggaaagctagctaagcagtgactggaggaaggccccagctctttggaacgaactttccagccgagaatgctttccaaaatgggaacaagatcccaaccccttatcagaaactttgggggccggatgtgtttcagaattcagaagttttcaaattttaagaagagaatacactgcgtattctgtgtattacaggggtcagcaaattcacagcccataggccaaatctggcctgtttttgtaaataaagttttattgctatacagctgtacctgttggtttacgtactgcgatggctgctttcagctacgttggcagagctcagtagtcatgacagtaaccatatgcccacaaagcctaaaatatttactatctggctctttgcagaaaatgcgctgaaccttgcatgttgtgtcacccctggaggtagcaccttgtaattaagcacatgaatatctcacatcagaatgaatgaatattcacactcagtgggacaaacaacttctgtcagctgtagactgcttttgccatcaaatggttattgaaagaactatctgtgttgacagccttttgggtttcatacagtcctttccagcttgggcagtatagataaatagatgcacaaagcagagggaatcaagtagaataacatggtttatttgtgtgtgtattgttctgtttttggtaaaatcatgcttatcatatcttcaatgcatcatttattctgagtccacattgctgcctttgagccggggccctgaggtatctcctatactctggctggggtgagggcggcaggtcctctgggccagcccagatccaccctgttcacggtgtgtgtcctgctgggctcacttctgaagctgaccttggggagcagattgaacacctgttgatgccattctcttaatttcaggggaatgtgtgggtctttgagctagagagacataggtgtatggcagatgagggaccaccccctccaccttagtccagttacagggcctcgcctttttgatactaacgctacatgaagagggacggggccaacagcaggctcttccttgacgtgttttatgtacactccagaaatattgacagagttgtctttttgttttggtttttaaatgtttttttaagttaacttctggaatgcatgtgcagaacgtgcaggcttgttacataggtatacatgtgccatggtggtttgctgcagccatcaagccatcttttaaatccattcttagattttccttttccatagctctttgtgatgcttgctttaatcagttgatacatgtttaatcacgttttgctctgggctgtgttatatacagctccctccctaatcttgctagaaggtagggctaatgcattgtcaattcagaaatagggggtgttcctgagtctggggacactctagtgaaattctatgtgtaaaataatttgtacaagtttatatttttagctaaattaaaatactcacattcccattattttttagaggttgtaagctaagtaataacattctagaaactctctgttttttgaaagggcatcaccactgttgaaggcgctaatgggagatcctaagtttcaggctctgctacagacgtcaggtcccctaggagttgggctgcctttgctctcctctccgcgactcggtacctggtgtatagttggctaaaaagaagttgttggggctgggtgcagcacctcacacctgtaatttcaacacgtagggaggctgaggcaggaggatctcctgaagcccagaattcaagaccaggctgggcagcatagcacgacccatctctactataaatttaaaaattaactgggtgtggtggtgcacatctctagtctcagctgcttgggactactagaaaggtaaggcaagagaatcccctgagcccaggagttggaggttgctgcagctatgttcgcaccactgtattccagtctgggcaacagagcaagaccccatttccaaaaaataaatgaaataaataaatacataataaataaacagtagtggttgaaagaaagggaaggaagaaatgctgttttaggaaatcaataggataatttttttttttttttgaggcggagtctcactctgttgcccaggctggagtgcagtggcacagtctccgctcactgtaagctccgcctcccgagttcacgccattctcctgcctcagcctcccgagtagttgggactacaggcgcccgccaccacactcagctaattttttgtatttttagtagagacagggtttcactgtgttagccaggatggtctcgatctcctgacctcgtgatctgcctgccttggcctcccaaagtgctgggattacaggcgtgaactactgtgcctggccaggataatctttaagaagaagataacattagctattcttctcacttcctacgtagaattccctaccctgtgtctttggcctggaaagggtattggtagcaattgtcttcggctttccctgccatgtgtatgcattcccacggccacacaagcacacacacacttttgtggttttttttttaattatataagcaagtaggatgtttgtcttagtttttttgggctgctataacaaaatgccatggactgaataatatataaacaacggaaatgtatttctcacaattccggaggctgagaagtccaagaggaaggcactggcagattcagtgtccggtgaggatttgtttttgatctcataggtgtccatcttgctattttctcaactagcagaggcaactctctggggtatcttttaaaagggcactaatggccaggagtggtggctcacacctgtaatcccagcactttgggaggccgaggcaggtgtctcggtggatcacttgaggtcaggaggtcgagaccagcctggctgacatggtgaaaccctgtctctactaaaactaaaaacttagccaggctcggtggcttgtgcttgtaatcccagccacttggaagggtgaggcagaattgcttgaacctgggaggcagtggttgcagtgagctgagatggtgccactgcactcctgtctgggagacagagggaggagactccatcaacactaataataataaagtaaataaaagggcactaaccctactcaggaagccttcactctaatgacataattacctcccaaagtccgcacttcctaatgttaccactctggaggttagaatttcaacatataaattttggggggacacattcagaccacaataatgttttataatgttccttttgctttaacaagagacacatgtcagatagtagacatgatctgagaagacacaaaacccagcgtggtgattttggcagccttgccatgcatctctaacatgcacatggccagaaaaatagcttggacattctgttcaaccctccacatcaactggtcagtttagtctttaaaaggtgataggcctgttgtggtggctcacgcctgtaatcccagcactttgggaggctgaggcaggtggatcacttgagccccggagttgaagaccagcctgggcaacacggtgaaactaagaatagaaaatattaggtgggcgtggtggcgtgcacctgtggcctcagctacttaggaggctgaggtggaaggatcacttgagcccaggaggcagaggttgcagtgagccgacattgcaccactgcaccccagcctgggccacacagagaaaccttgtatccaaaaaaaaaaaaaaaaaagtgaccacactgtggctttgctgctttgcctaagtatttcgtgaaattgatcgttcattcacaatgctcagtgcagtgactttgccgagcacaagtggtggacttaagaagccacataaagaagcacccacgtctttctctgaggacgtgcttgtgtgtgttctgaggaaagcaggtgatgatccctgaggtgtatcccccaatcccaaactagaagtgagtccccctgctcctcaagcttgcatggcgctcaggtattccagtgggccccgctgcattcttcccagtcccaggaaatctttgtgcatggctgtcttttctgtgccatcttgggcatctcacgcattggccctatccacatgttgcctccagcatcccaggaactccgttaatgtttatttgaatgatggaatgaaggtgtcttgctatattttgacatttctgtcaaaatatgaatctatctttgcctagcatcttttcatgtgcacattgcccatctttataacaaagtgtgagtgggaaaggacttttaatcttcattatattatcattcatatgaataatgttaacaattagtgtttattgagcacctgctatgagccagatgtagtgttcagtgctattcatgtgttcttgaattaaattttcatggcaagcctaagaggccatgactgtccacattttgcctctgagagacgcaaggcttggaggcaggaaatcactcactgaaggccacagcacaaagtggggacttgagtcccgatctcactgattctaaagtccttgctctccaacctctgtccatctgaaatggaaaagcactgacgcagttctcactctggagcttgttttattttgcttgggctgctgtagaaataccacaggtcaggtggcttaaacaacaggaatgtagttcctcacagttctggaggttgggagtcctagatcaaggtgtcagcagggttggtttctctctgtaccattgtccctggcttggagatgaccatcttctctgtcttcacatggtcttccctctgtgtgcgtttgcatccttatggcctcttcttgtgagggcactggtcatattggattagggtccaccatataatgactttattttacctgaactgtctcttaaaaggctctgtctccaaacacagtcacattgtgaggtactgggggtttgggcttccacatacaaagtctgggacacagtacgctctcataagagacctcttctcaacaggatccatgtttgatccgggggaataaagctagagttgctttcttccttgtaatatgtataatgactcatgagagaattccccactgtcttccccacctgagacctgagaggaggagaaggaagcttggagtcgctgccctgtggcctgaattggtcagtgaccaatcactcagacccagctgacaggctatacgcggacaccttggatgtgcccagcatggatcttctccaagtaggaggccttggagtcagagaaaggtgcaactcccactgctgctgcaagaacaaagactttaagatactgaaatttctgggcaaagtttcctcaactcttcatttaagtgttaggccaggtggggtggctcatgtctgtaattccagcactttgggaggctgaggtgggaggatcactggaggtcgggaatttgaaaccagcctggccaacgtggcaaaaccccatttctactaaaaaaaaaatatatatatatatatatatatatatatatatatatatatatatatatatatatatatatatatatatatatgtagccatgcatgggggcctgcccttgtagtcccagctacttgggaggctgagacatgagaatcgcttgaacctgggagtcggaggttgcagtaagctgagatcgccactgcactccagcctgggcaacagagcaagacgccatctcaaaaaaaaaaaaaaaaagtgtaatgcaagtagaaaagggcacacactccaggtgtatatctcaacaaatttgtacacactgcatgcacatgggtgacccgcacccacatgttatacacagaataattacaggaccctgccaacctcctcctatcccctttcagctcctgctgtgatgccacttctaatctcaattttattatacaatttgttaaatacagaagtaaatggaggcaatagtgatagtaaaaagaaccatgtgaattgggcgtggtggctcatgtctgtaaagccagcacttcgggagtccaaggtaggagggtcacttgagcccagcaattggagaccagcctgggcaacatcatgagaccccatctgtatccaaataaaagcaacaaaaaaatgagacatgggggtgcatgtctgtggtcccagctactcaggaggctgaggcaggagaatcacttgagcaaaggaggttgaaccatgattgcaccgttgtactccatctagcctgggcgacagagtgagaacctgtctccaaaataaataaataaataaataaaaataaaagtaacagaaccataggccttatctttatctgagttcctgtagcatgtgcactactcctgattaaccaagtgaaagagaaaatgagactaatctctaacgtcagcttccttttctgccaaatggaagatcatctctaattaataatgagttagaatacctaggacagtatttggcacacagttgatgaggatggtgtacctagtagctaatggtgagtaggatgaataataatactataccttttggtttctgaaatgagaaatctaaggaactggcttaaccaagaagcagcaagctgttttaattgtgctgttaggagggctgtttgttaaggtacagaagaggattggcccatggctttctgctaagaacctgctgaatgtctgtatagaatccctgcattgtgcctcctatcaatcaggtgcttaggtttgacaagtttcctccaacagactcgtgtagaagtttctgtatcaactggaaaaaaccatggtgcttgggacattcaaggccgaaacttggtccctggatgggagaagatagctgtatcattggcagagctgccttggtcatgtaccctctccagactagacactagatagtgggtagggtgggacagttttatgtcctctgccaccttatctgggactcttgtcccctgagaagtttgaaaatttggcacattttagtatttgtcagtgtacttcctgcttcttgatgcacttgtactgcacaagaattgattttcaggaaatatggtttttttttcctttttgcacagcgatgggttagcaaaatgcatatttgcatagaaataatctttagtgagctctgctggcaagtgtgtcaaatttataaatatcactactataaagacatacttttggatatggatttcttcctcagtttatttcttctttcattttttcatgtccaggtcactacgtattgcgtatatttggttggaattttatttttgagcaattcacttacccagattgtgtttctggagattaaagcatctcactgtatttttagttttttctacattgcaatttcaaaataatccaactcaaaggctgttgaaaggctccttctgtttaaggtaaagcctgtggcagcctttaacttcctttctcttctcctgctgccaccttggtccacagtttatctttgaaaatgctgggttttaatgggcagggtatagtgcagaaaccagatggttttaactcacacctgtgaaaatgctggggatctgcgaaacattaaagttaatggccagaataaggctgccaagctcggtggaattgtacttaactggcatatcattctggttaactgaactttccattaactcacagatctatcttttcatgcccccttctaaccccctactcaccacccacccagttcctcctagtgggcagtttgctgctgctgtcttacctcctcatcctcacccctttcacctctcccctggtaactgatttatttttccctcttggagttgcttattcttttcttcttccagttgcatctctccctctacttagatacacatttccattttacttctatttggtagtctcagaacttggcttttattggccagtatattcaatgattcacttgcacctttaaccttgtgttgttctaatcttttttttttttttttttttttttttttttgagacagagtcttgctctgttgtctaggctggagtgcagtggcaccatctcggctcaccacgagctctgcgtcgtgggttcatgccattctcctgcctcagcctgcggagtagctgggactacaggcactcaccaccatgcctggctaattttttgtattttttagtaaagatggggtttcaccatgttagccaggatggtctcgatctcctgacctcatgatctgcctaccttagcctcccaaagtgctgggattacaggcgtgagccaccgtgcccagccttcttgttttaatcttttagacaactggacacaggtttgtctttgaaattgtactggtttttcttgatgttttagtgctcctggatgtccaatgtcattcttgggctagttgaaggaaagttttggctacccagttgttagctgctgaagtttaactgtgcattctaagcacaccagtattttattacatcatacctgggcagcagataattttagtaaaaccttgaaaagatatgactattgggaagaaatttgggattctatcctttttctctccattcttctctcctgcaccaagtttctaagctcgtgattaaataaattctgaccctactctgataaaagtgaacccttgtggctggtcgcagtggctcatgcttgtaatcccagcactttgggacgccgaggcaggcagatcacctgaggtcaggagtttgagaccagcctggccaacatggtaaaaccccacctctactaaaaatacaaaattagtcaggcgtggtagtgtacacccataatcccaggtacacaggaggctgagacttaagaatcgcttgaacccaggagacgggggttgcagggagctgagatcgtgccactgtactccagcctgggtgacaagagtgaaactccatcttaaaaaaaaaaaaaagtgaacccttgtagtttcttcctctgtttgacagatggaccctaagacggccccagtgataccccacctcctggtgtccaaggcctgatgtgatcacccttcccccaccttgaatgtaggtgggatatgggagacttacttctgaccaatagaatatgaaaaagataataggatgtaactgtttagattcggttacactatatggcaaagcaaagggattttggaaataccattaaggtcttacatgagacagattttgagttaatgagcagggggatcctcctgggtgggcctgacttagtaaggggaaaatcccttaaagaggagctaaaataagagagtctctctctccattgctggctttgaaaaagtaagctgccttgcagtaaggaactgcatttggcttctaggagctgagagtgccctaaggaagccagcaagaaaatgaggacattagtcctataaccacaaggaaatgagttctgctagcaacctaagggagcttgaaggtgattgaccatccccagtcaagcctctgatgagaccgcagccccactaggcaactagatttcagcatggtaagaccctggatggagaacccagctcagccatgcccagactcctatcctatggaagctttaagataataaatgtatgtggctttaagctgttaagcttttggtaatttgttagatggcaacagaaaatgtgtacaccctggatagtagacagagactgcatctttctttggcatttggctgcacagcaagttctaagttactcaccaggtttcagaggagagatgggaatttgatgatcttataagaaacctgtactctttggccagacacggtggctcatgcctgtcattccagcactttgggagaccaaggcgggcagatcacctgaggtcatgagttcgagaccagcctgggcaacatgctgaaaccccatctctactaaaaatacaaaaatcagccaggcatggtggcgcatgcttgtagtcccagcgacttgagaggctgagggatgagaatcacttgaacccgagaggcaggggttgcagtgagtgcggtggcagctgggacattaaccaagttgtgaaaggagccatgatgttattagctgagtcatgtcactgcacctccagcctgggcaacagagtcagactctgtctcaaaaaaaaaaaaaaaaagtgtactttttgaggaaagttctatttttcattattttccactatgaatgaagaagaaaataatatacatacattactgggattcatacggacattatttagacacacttccacctacagagtcacatattgtatagaataaaatatcatcaggagcagctcatgtgaccagaatgtggcaaagtctttgctctacaggtcaagttgggacttactgaggagaaatgaggggacttcaaagtccaggttgcaccatccactttatagatgaggaaagtaagaacccacagcatcttgcacgtagaattcaatatatgtcctgcttcttgaatcacattgacctaacaggtcatatgatttccatttgtttgcacaacaactcaagggcaaaagtgaaattggaatttttgcttttgaatttctgaaaccttgttttatttatttattttctaatcttttttttttttttttcgtggaatcatgttcccttcggaaaactccctgggtgccccagcattatgtggtaaaggacatgtatttccaactggcaggggctctgcaaagtttctctgcctcctttgctaaccaaaccctaaataattgtctggatgttccttttattgtcacctctgaaacaagacgaagatttggacggtttgctttagagtgcattaacttctttatcacattaatactgactcatatcttatttcccacttgcaataagaaaaccattcaaatctttccctcacaggacaatatctttaatagcttctgtgtgtttcctatttttggctgtttctgtataaacagactaatctaatagcatactgaacccatctaacttggcagaaattcagaaaatcactcatttctatggcaagctgagatgctgagaagggggaaaaaaccctcacttttattgcagcaagatttttctcaaagttgcctttcatgaacataatatgtctatcatttggaattctccagcaccctggctggaaattatttattgcagaacgacacaatggtgaacgagaaggtattattccctgtacgatttctggcttgaatttgtttgcctaaaggagcagatatcgtatgaacatgattttgaatgctggcatggtgatgaaaggtgatgttcacctggagtctgtacacacaaaaccctgttcattttacctaaagggtaagaacatcatggcccccttcatatcctggttaatgtccccgctgaccctgagttctgcctccatcactggaacaagagcctgtctttgggaagaggtgtcttccctggcactcgtttgatttgtagccgccacacatggcaggtcccaagctgtctgaagtcttggctgccattcctaagctactaaaactttgctggagaacatcaccaatcacgctgagggatcctttgacaactcagcttcatgaggacagctgcagttctgcgtttaggctggggtcaccggggtcgctgccccagccccactctttagcctcagtccctctgtggttcccctgactgagctcctcactaaaggggaggaatccctggagcctccccatccaaggccagcgtgttccatttgagggtaactggatccctgaaattcacccccacacaatccacaacctactactagaatgccatatgcttttctatatgctgttgtttaatttcagttggtacatattttattttttgaaacagacttcgttagaacatctttagatttaaagaaaaatcaagactgtagtaccaagttcccatgtgtgtaacagccagtttatcctattattttaacgtcttatgttatttggtacatttattaagattaaattattgatactgaaatattaggttgtgcaaaagcaattgtggtttttgccattaaaagtaatagtaataataatactcggttggtgcaaaagtaaatgtgttttttgctattaaaagtaatgcggttttacttctgcagtttttttgccatttgccaattacttttgcagtttttgccagtacttaaaagtaatggcaaaaactgcaaaagtaattggcaaatggcaattgcggtttttgccgttacttaaaattgcattacttaaaagtttttaagtaatgcaattacttaaaacttaagtttttaagtaagtttaagtaaaatttgcattacttaaaagtaatcgcagtttttgccattacttaaaagtaatggcaccaacctaatattgttattactttttaccaacctaatattgttattaactaaagtccatcgtttatcatattgccttaggtttttaaaaaattttttacctaatgacttttttgtgttccaggagcccatccaggataccacttttatttattttttttttctttttgagatggagtctggctcttttgcccaggatggagtgcagtggcgcgatcttggctcactgcaacctccgcctcgcaggtttaagtgattctcctgcctcagcctcctgagcaggtgggaccacaggcatgcgccaccacgctcagctaatttttgcaggataccacattttatttaattgtcaggtctccttagcatcttcttggctgtgacagtttctcagaattgtctttgtgatgaccttgacagctttgaggagtgctggttgggtattctgtaggatgctcctgtgttgggatttttatgatgtttttctcatgagtttactggagttaatgaatttcagggaggaagaccccagaggtctgttttcatcacatcgtatcaagcattccaccttcatcatgactcttcactgttgatggtgactctgattcacctggtcaaggtagtgttcattaggtttctccactgcacacttagtctttccctctactttccacactgctgcctttggaggagtgttgctgtgcccagctcatgcttgtggagtggggatttaatgttctcactcttcgagggtagagtatctgcataaactacttggaattctgcatggaatatttgtgtcttctcccccatttatttatttaatcatttatttatatcacggtacactcatggacatttattttatgctttatgttataatcctatactactttatttattttgttgcttaaatttttccagatggaacaatttggtcttcaaaagttgctgctgttggctcctgtgttcttgtgatgtacacacatcatggtgtggtgtgtttttatctttggttttgttttcacttcttttttgctttttgtgcctcctcttccctcttccccccacctcatacatacacaaagggcagcatgctactataatttctggaatctcagccatattcttcttttttttgttttaaataaaaatcatactagagcagtaggcagtgtgggtgagttctcccactttacattttactttgcataatttaggcccctttcaggccactcttccccctgtgccccaggtgtgtttgctaccatacctccccaggggatagccctccaaacctgattggccaactagtctggtcttaaagtcccaaagggaggccatcacaaactactcagtatggagaagacctgaatcctaattttggcttaaccccaaacttgggcgattcagttttacctgtgtcctctctataccatagtttatgacaaggggttttctgtggctggtctccaaggcctcttccaatcttgacattctgtgatcctgtaagtctttgaataatggcccaggatgccaacaagaagtcaccaatgagagttcaggtgttctgttggaaatctttgtaaaatcacagagaaaaggagaagaaaaagaataaagaggaaaaactggacacataaataggaagacaaagaatgaatgtggactggggagagaagagtcattgacagggacaagaaataaataactttgatgcaaatcctgggaagactctggaacaacatggaggcacctatgttaactctatttcattttggaaaagttgactagacaaaaggtgcagagtagagtatgcagtgatttcagggtgttgggctctgacaagatgatgccgacttagacagtgttagtcaacatcaaatgtctggatcaagagaggcaagaatcccgtggatttggcgttggccagaacttgtctggaatcttgttttctgccttgagtgtcacctgttgagagctctgttgacaaactggcatttgtccttgggagagtagcctcaggaccaggggtgaagagttcagtaaactgtgtttaacccaaggaaagatacagggtgtgtcagattttgtaaggattttcaaggagcagtagatagtggccctacagtggaatgaaccttcacaccgaggatctgcttcctttgttggaggtgggaaagcaaaagctggatgcttggaattgtcatggctgccgtctgagtgatgctaccttgagtggacggtttggccaactaaggagtaaggcctctccctcatgtcacattgagtggtgctaatgtttcctgaagtttccctttcttttcagttcagtgtttcagaatctcagccttccagcagaatcccctttgtttgctctaaatatacattcccaagccccgtgtggccattctgatttactaggtctggggttgggggattgtgggtgccgagaatcagtatttctatcaagctcccaaggggacctgatatatacatggagctgaaaagtacccacctaacagacttgccagctccttaaggataagaactatattttcttcctttttttgtatgcctccccatgcaaggataattacacagaataagcactgagatgcctgttgatggatttattccagcaattttttttttttagctctctttgtctggaactttgcaaaataaacaccatggtcactccgtgctttgtgagtgacgtgctagaatggaatttcactgttttaaattcagggttaatttcttgctttcaaatgaattatgaaaggaagaggagagacctttggaaaagtctgaatgttgatgccgacgactagccaggcgcttcccttccagctggtttcgtgagggattaagaggccactgttgtgaatctcccattagtgatggtcccaggccccctcctcattgtgcatttatcttacaagaggcatatttaggagatgtttccgttctattttatctgcagaattactttccattctcaggtcttttatataagtattcccttgaacccgttccaaaaactggatttttaacccaatagaccataactgcagtgttttattgtgcttacatatttcaaaatgtgaatgtaagtagatttagcaaagttaaaataaaatgaaaacttttcaaagggcaccactgctcgcattcccatgttggagttttccctttggggttcttatgccattttaaagactctgaaaacaggaagactttttctcttgggtattttatttttttttcctctgcaagggatggggtcataagacattggtgaggttaggccttcctttgtctcccaggagcacacttgatagcaatgtagggtgaattccaaatctgtgagttagtgccgtatatagcagtgttgtcagtaagatttctcactggcatctctgcttcccctcttgactctcttgaaatcccttcttcaggcagaagctggagtcatttctctaaaatagaaatctgatcttgccaccaccctacttgccactccctgcttaatcccttcactggctcaccatatcccttaggataaaataacaaaatcctttccagggcctgcaagacccctgccaacctctgcagcttactttgtaccactttccccagaaacctgctacctaccctgctccttgccacagggcctttgcacaggctcttgtctctggctagagtagtcttcccatcctgctttagctaatcaactctttctcatcatttaggcttcaaatggatcatcactttctctggggtgcaggggtctttcatataagtatttctttgaactcattccaaaaaagtggatttttagaaatagaaaaaactaatttagaaatagaaaattaattgagttttagtttttagaaaattatctaagaagtagatttttagaaatagaaaattaacgtagatcacagaaaattatccaaactcagttaattttcccttttccagcaactgtatttgtcctccccacttctcttccctgccttctttttttctccttagcacttacaatgtctcactcatgtagactcgaagcttcacaagggcagggattttagtctatttcattgaaaatctgtcaccagtcactggcccagagagagtcctcaaaaataattgttgaatgaatgaatgaatgaatgaatgatgatggcgtgatgattgtgtattcctcatctggctgtaagtttcacaaggccaggcactggggtcctattttgctcactgttgctgtgtgggaaagagttagtacagcagactgtcgcaagcttggctcttggctgcatctgggaacttggaatttaggagggctgtcaccattcccagatcagataaagatggctcactctgtctagactgcttgtaccaaaaatagggctcatgtggaatacctgctttcctttgtggaggctggaattttgttatatgctacagagagggtgcctacgtggccaacttccaataaaaactgtggacactgagtccctaatacatttctctggtagacaatacttcatatatattttcacagctcatttctgggggactaattaaatgcatcctgtgtgaccccactggaagaggacatttggaatcttgtacctggttttctccagacttcgcctcattcaccatttccctgtgctcattttgccttgcatccttttgctgtgataaatctcagccatgagtgtgaccgtatgctgagtcttatgagtcttccttgcaaaccaccaaacctgggttggcgtttcagtgcctgacacagttgtattcctaagacatagttgggaccagacctcaagaaaatagccaacaaatactgggtgaatgaacgaaagaggccatatgcagtcagcccccctctctctgggttctacatatgtagatttaactaatgacagattaaaagcattcgaacaaacggagggtggtatctgtactgaaaatgtaccaactgcttttttttgtcattattccttaaacaatccaacataaccactatttatatcgtgtttatattgtattaggtattataagtaatctagagatgatttaaagtgtacaggagcatcacatacattatatgcaaatactatacaattttatgttagggacttgagcatttgtggattttggtatttgggggggttccttgaaccagtcccctttggatactgagggacaactgtacaaatcacatttaggagtggatgcaggtcagtcgtgacatctcatccaccccttcctcacccaagattctccgtggcttgtgtcaaggcctcaccacatcagaatatttctgctcatggttgctgagacagagctggacaggtccagcatccattccccaaaacagaactcaaactgacgatcatcaagatattccagctatggcaaactgcggaagaattaggacagatgtatgacttatttcatataaagctaaatcagtttaatttatatgattgtcctttattatgagattatgttcaacagatattttcagtgttaaaatattcttttttttttttttttgagacagggtctggctctgtcacccagggtctagcacagtggcacgattttggctcactgcagcttcctcctcccaggctcaagagatattcttgcctcagccctccaagtagggctacacgtgtgtgccaccgtgcctggctattttttgtagggacagggtttcaacatgttgccaaggctagtctctaactcctgggctcaagcaatctgctcacctgggtctcccaaagtgttgggattataggtgtgaaccaccatacccagccaaaatattcttttcaaagtgattagaagtaggagaagcttgctctctttttattggcacttctgtcttacatgcactttttgatttaaattattctgtcttctatgaaatgacagtgattggaggtggtttatttttttttaagtctgcttactcggaaaaataaaacaaagttgacaacctgatttcagacctcccaattttttcttaaaaaaaataaaagtcttcttggtccatgaaatccagaaactggagaccaaactagcaaattcgcaaggagctgcttgatagaaaaacacttgagatcaagagtcagaaatagctgggttgaattccagttctctcatattaagtgacaagttgcagaatgcccctgtctttctgagctgtttttatatctgtacaatggggttaatactactagtatttgcttccagggattgttttggaggggagtgaggaataaatgatataattcactaaaacacgtagaatagtatttgacacagagtaggtcagcatgcccaaagtatcagagtcattattgagttattccgctacctccgtatttgagtcctttcttttgggctttcctacttaacgtcgcagatgttatttttttgaagagggtgtaggccaagaaaggggtgggagaaacgagcaaggtgttgatagaaccccttagtgtcctcctcataccacagacactctcttcccccacttacttggccaatttttttttttttttttttttggtggagtctcgttctgtctcccaggctggagtgcaatggtgcgatctcagctccctgcaacctctgcctcccatattcaagggattctcctgcctcagcctctcgaatagctgggattacaggtgtgcgccaccacgcccagctgattttgtatttttagtagagttgggatttctccatgttggtcagactggtctcgaactcctgacctcaggtgatccacccgcctcagcctcccacagtgctggggttgcagctgtgagccactgcgcccggcctacttggccaaattcttgcctgatcgcctctccacccctgctacgtgtaatagaaaggtagggccatgttggagagggatccaacatttattatccccattttacagatgaagaagttaaggtggccaggcatggtggctcatgcctgtaatcctagcactttgggacactgaggtgggtggatcacttgaggtcaggagtttgagagcaatctggccaacatggtgaaaccctgtctctactacaaataaaaaattagccgggtgtggtggcgtgtgcctgtaatcccagttactcgggaggctgaggcaggagaatcgcttgagcctgggaggcagaggttgcagtgagctgagatcgtgccactgcgctccatgctaggtgacagagcaagattccatctcaaaacaaaacaaaacaaaaaaacaagaagttaaggattgcagagcataagtatcttctatggggctacccaactaggtcgggacagggcagggatttgaacctaggagctcttggattgcaatttttcattcacccctccctctccacccttcctgtcttcaagcctgagcaggtgatactgcattttgtaccgtatgactttaaaacagaaccacgagttcagaactttggttaggtcctgcccgtgttctctagctaacgcatggcaacgctggtttccaacctttcactgtgcgggtttctgatgagtacgctggcaggcctctggcttcagagatgccactacaaaggtctcctccttttcataaacattgctgcaaggcccgcttctcaagaaagcaacttgtgctacctcctgcgtgcttttatgcttcgctgtgaagtgcaaagttgggctggcaggcctggctttcttctccgacttatgtatgattcatcaagaggactccaggctgtggtgtgcggtgcaacccgggctgtgttcccgagtgcatcaaacggggattgggacctgttttccttcccactcacatgtaggtcacctacgggagcaggggaggaaccatctgaggtgtttttttttttttttttagatttctcattgctgagaacagttccagctctgccgaccaaaggctgagtgtccttttattagtctgagcccctagagagaccaaagaggcaaccctcgagccaactgacagccagctgtggggttggaccctgtttttcatacagtgagcactcttgaacccagagaaggtgcaggttggagatgcagctatatgactctgtaccagagagagacctttttgtacatttggaataaaaatttttagcattagagattcgcttttttgtgtctaaatacaaatgtccaggagaataggaatgccatagtggtgagctaagagcaggcagttagttaagtgtatgacaagtatctcattataaatggatgctgaaatgtccaagtgtggaaatgatacgcttcagctcttatttttaagtcatccttatctctttcacttattccctcattcaggcaccaaaaatgctgtttgactgggagagcaagtggagctgttcaaagttgtagggacagccgggcgcagtggctcatgcctgtaatcccagcactttgggagggcgaggcgggcagatcacaaggtcaggagttcgagaccagcctggccaacatggtgaaaccccgtctctactaaaaatacaaaaattagctgggcatggtggcgggcgcctgtaatcccagctattcaggaagttgaggcaggagaatcatttgaacccaggaggcggaggttgcagtgagccaagattgcgccactgcactccagcctgggtgacagagcaagactctgtgttaaaaaaaaaaaaaaaaaaagttctaaatcagtggattctgccgataaacatcatctggacggaatgaagctgagggccaatagtttagaggctcagcacccgactggagagagagagagagagagagagagagtgtgtgtgtgtgtgtgtgtgtgtgtgtgtgtgtgtgcgcgtgcatgtgtatacgctggtgtttaggtgggcttgagaaaagtgctgactttgtgaacgaggaggagggaaagggtccagagcagtaaagagcctgtaaataaattcataccagcttcagccccatgctttcgtttgggattcctcatccaaccctgacggcttccctgcgggacatatttccccctcttacagataggaaaccttgcccaatgtgattacgccaggaagtcagatttcaaatctaaatgtgcctaatgccaaaactgtacctcttgccactcaacatctgcagtcaaaggcttcctgactcaggatttgctggggtctggctctgggctattagaattagatgcgtgagaccctttcaatctaaaccttaagtattttgcctgttggacagatgcctggttgtccctttaatccatcgcccaaaaagcctgaggaaggatggcaggtggacttggatctaggccactcccttagatcctgattaggggacctctgcgactgctcatctgggaggaactaggggagcgctaatgtgttgtccttgactgggcaagaagggaaggagaattgtgaaacatgcacaattagaagtcgtgcacctgggttcatatcctggctgggccacttactttctggcgggtggggagggcagacaagttgctcatcctctctgcgcctcagtttcttcatctacaaaatgaagatgttggttatttctttattcaagggttgttgagaggatgaagtgctaaaaatgcttgaccagcattcacacaggcactaagacggtgagtactcactacttagcgctgtcaacatcatctccgtccacatcaatgtcgtcatcgtccttatgaaaagccctgggcatcattttgcccttgagctggatgtccatgttggaaaaacagctagtggaaggcgtgcccaaatctcagaagttggcgtttccttgcagatatcattggtggccattggaggggaaaaagatgctttggaaaccaggacacagagaaaagtgcctcgtattatacagagccaagagaggtcactgtggaagtacagaggaagccttggcctaattgcacggttaatacaattccgtaactcatcctgccaacacgaaggtagatggacggtccttatgctcgctgcggaacactgcctgtgttttcctaggagagacatctgcactctagtagtgattaaaatgcctttgacaggctcttgctattaagagtttctggctccagtttaataaaaggtagtatattataatggaaaccaggttattattgataaggactagacatattagagaccaggttaaagctttgatagtcccaaatgcaaggggagggagctaagggttattgcaaacctactgtgtgtcaattgctctaccagacacctcagagacatcacagccaaagacccccacctttgaataaaccaagtttggcctctctgatatattaatatatttaatcatcagactttcagtgttaaaggagattacagtagaggcatccagttgattggggaatagttgttgcaaatgataagctcttttgaataaactgatactgacttaatgaggttctgctgtgtactatcttttttttcctaatagaaaatagagtagctgccctccccatccgccattctcagtccttttgcttactagtaatgaccctcttttctctcactccatgggaacttttaaaactgataattaatggatttttagcctcaagtttctggaattctaagagggcctgaaaggtaagtgctcacttactgaggtgtgtgaacaaaaacaggcaacctagctcagcaagtaagaatggagtggcatctccccacctgctctggagtcatgtgtttgcttctggaagggaggcaagaggcattcaacctcctgttaatttggttgctccttcagatacgctcttcatggtacagccctgagctgcatcatttaaagaccaattgttaaggaccaatctgagggcctgtgcattagttaaaactccttatctggtcatagagggtggtgtggtttggacgcgttccccttgtctgtgcaattcccaacagaggcaagtgcgcatttgagacaggttgagggttcaagctgtccaatccctgctcatctgcagcacaccaaggaatgtggactaatgaaaaataaactgcatgcatgcaatgcccatcacactgcctgcattttctaatcttcacaataactctgtgttgagaaatattcctgtctgtaatcccggcactttgggaggctgaagcgggcagatcacctgaggtcaggagtttgagaccagcctgggcaacatggtgaactccccccaaccaacgacccttcccatatctactaaaaatacaaaaattagctgggcatggtggtggggacctataatcccagctacttggaggctgatgcagcagagtctgttgaacccaggaggcagaggttgcagtgagccaagacagtgccactgtgttccagcctgggcaacaagagtgaaactctgtctcaaaaaaaaaaaaaaattgtttctggccccacgttacagatgaggcttttaaagatacccagccaatggtccacagtgatgtaactcatcagtggtccacctgacattggaaattcggttgctttggaaccttctactacatcccctttccttactcactgacatcattcccagatcaaagaaagataaaagaaggaagggctggagacgttgttttcctgtatgctccttgatgaagggctcagagctaagcgcggagtaggtgcttaagcccttccatttgaaaggagctttaaacacctttggtggcagctaagagtgtcaaaatggagggatgtgtaggggacctagggcctgggtaacattgtcccaggccagggcctattgtgttgtgtgtgtctccactttccagcctttgggaacgcagagggggacctctgtaattggtaccagcatcccttccttgcagggtccgtccttcctctgagttgggggaaggggtctccatggtttcttctaccaggtagacccagaatcactttcaacttgctcacctgtctgtgcagtgtttgagttcttccctgggaagcttgctcacatcatccacttctctctgggttctccgtaccgctttccccaatccaagctaagctcttctcttagttattctaataactgcccaatatcaggcactaccctcaacactgtttcccatggcaattattttacatgacagtttaaaaaacaggaatgctcgatttgtattcccattttgcagacaagccaacgaaggcttggaggggttgaatggcccaagtttcctaagtggccaggggcagagtcaggatctgaacccaagacataggcccaggagtctgtgtttgttctttaaacctctctattcagttgcccagctcttttcattccctgtcctttccccctctggctgggtctgcctttccaaccgctaccaccttccaccaccattttttttttgtttcctctgcaagcaacatctgaaaggcccagacccagcttgttggccttgggctctgataagatctgtctgcactccttttgtctggcctgtacctgccttttctgaatgaccctgttaattgcaattgactctcatagaatgtggatagcagtgccacttgacaccagactaatgcttctgacttttccatggtgccccagcagcaggctggagggaagggcgggggcggtcagaggagagatagagcacttcagattccaatcgaatacattagagcattagagcttttctcttcctcagggtgctctctctctctgggttgggaggagatgtggcatttctaggaattcacagtaaaatcagaaataattaggagatttcacagttgtagctcctgtgaagattcaggaattttttttttcttctatttgcaagctttagtcctaggcatggaaaaagaactttgaagaaaacctgagagatatcagtgtaaaacaagagaatgattccctctggggtgctggtagtgggggcttaatttcctaaaggcttactgggtatcagggctgctttcctttataatcttttacccgtcttatgggggatgaacagaaacacactttagtgctagaaaagctgggcctaaaagaccagtctcctgtcccatacttggacatttattgttctttttgggcaaggtgaaaacttgaaaccaaaagtctgttgagtttggaagacttgactcccaggatgtacaaagtacttctgcatgtgcgcaaagtcctgtaggcccaggcatcaatgacacatgcagtgtgggcccaggcatcgatgacacacgcagggaagcaacccaagctgggtcagtccttacaaggagaccggcacctgggctcacaccttgccgtatatgacttcatgggaacctcataacagacctgtgggctcagaattattctctcactttgcagatgaggaaatggaagtgcacagaaggaaagtaagagtgtttgagatcctgtagtgggttcattgctgagaataaacccggagttgcctctgggaggacctggtggtgggtgggatggagagagaggcctcccctcagactccaggggcacagattggattttttttttttccagacagtttcactcttgttgcacaggctggggtgcaatggtatgatcttggctcactgcaacctctgcctcccaggttcgagtgattttcctgcctcagcctctggagtagctgggattacaggtgcccgccaccacgcccagctaattttttgtcttttttagtagagacagggtttcaccatgttggccaggctggtcttgaactcctgacctcaggtgatccacctgccccagcctcccacagtgttgggatcacaggtgtgagccaccatgctaggcccagattggcttctgtgtgaggatgaagagtaataggaagatagagtggtgatctaatgtcaactgtggagggagtgggaggcaggtgttcgcagggcacagctggtttcctttttgaatcccacacagtgctggggcagtttcatagcctgtgaccacacagataggaaagtgacacagcaacaccaggcagattcattttctttaaatgaggggttcaaaatagaaacacaaagcattgagtattgagaagaaatggatcttcaggtttggagggaggccgatagagagtgtctggagttgccaacgtcctctccttgggtcatgggtgtgtgtgtgtgtgttttcttcttgttgttgggttttttttttttttttttttttttttttggcttttgcgcctatggtgacttttagcgaatggatactattgaaggaatgtttcacttccaaatccagatctctgacttcccttgaaaatttggagtgccactcaagtcggccgctctgagctagaatcctggtgttcagaattggcaggaagggcacaggggcaaggtataggctcacgtctccacattctgcacctcccaggctcctgccattgatgtgagcgggttcctgtactgcatgaagcaggggtttgcatccgaaacaaccacccgtgctgaatatgtaggtgatacgttgatctgtacagcaaaccaccatggcacacatttacctatgtaacaaacctacacatcctgcacattgtaccctggaacttaaaagttggtgaaagaaagaaggggccgggcatggtggctcacgcctgtaatcctaacattttgggaggtcgaggcaggcagattgcctgagctcaggagttgaataccagcctgggcaacacggtgaaaccccgactctactaaaatacaaaaaattagccgggcgtggcagtgtgtgcctgtaatcccagctattcgggagggtgaggcaggggaattgcttgaacctgggaagcagaggttgcagtgagccgagatcatgccactgcactccagtctgggtgacagcgcgagattctgtcttcaaaaaaaaaaaaaagaagaagaaaagaaaggaaggacagatggaaggaaggaaaagggaagggaaaggaaaggaaccagctgcaaaaattgtcctaactgagcattactgtaacatagaacagctgaaacactcctcaaagctgagaggagggtttgggagagaagcaggctgtggttgtgaacaggtgcctcctccaaaaaaattctcttccttggatttcaaaatgacccccgttgacaacaaagcctttcacgctgtgtttattttttttcaggtctaagtttcccccaggagattttttttttctaaaggaaaaggcagagaagcccccagaccggagccacaatcaaatgcaaatatgacaataggacccatcctggagagaaaaagccttctttttaattagaagcctggaaggacataccctttaattgctgcacttgtagtgtcagggttatcaatatccgtggctctttcattaataaactggcgagtcagaaagcagcaggagtgggaacctctccccacccaatcccctctcacgccccaagctctatttaatcaactgcagactcaatcaaatggggaaaagaacatgtaaatcagctcattcattctgctggccctaaataggtagaaggaagggaaacatgaaagggagccttcatctgttttcctgcagatgcccggctcgtggttaacccaagcaagaggtagttaaacggccccgcagattgccagtgactccgggaatgcctaggtttatgtatggattaacacagtgatagaccctgagtagcaaaagacgaagactaattacctgacagagctcccctccactcgcctgggtcattgaaattaatttctgctttcaagcttggcagaaagcagctgcagaatttcagttcaatacttaaattaacggggagccgaaattatttctgtgcacaggcagtattagaggagtggcttaccaaatagatcttgatcgcagacacggaaaaaaggattattcctccccttttatcaagagccgtaagtccttggaaaatgcaaagagggggaaaaagaagaaaaacagcaacgagtttattggagagttaacacttaaatactccagtacattgagtgtgacatgcctgtgtaggagactgtctgtcccccaaataattgacaatttctctccatctaacaagaaaatatatggcacttttatatatacttgaattggaatccctaatccagagataatttgtgaatatccattctatagcatcccatgttgtcaagaaggtgttgacttactgcaaggttaaggaaatgggtggagaatgtagggaggaggtggaggataaaggataggactaggaatcagagttgggatttgaacccagggcttctgtctccagattccttgttctgtccctttatgctgactttccttttttgctcaaagtctctctccttgcttctttctctttgggctccctgcttttatttcggccctgatggaatctgtcgactttactgagctccatgtatgtgcaccaggtcagattcaatgctgcctaggtccacagtcctcagttatttgttcctgtgattttcgcgccaccaggagccacttgttggatgagatttccgggcaagttgagtctccatgtttttgtcgtgggctactgccagctgagatatggatgaagactccctttcatgtttcccttctttggtgtccatggcagttcccacctcgaccgctatggtatttcttttgcttctgctgaggctgtgtgtgggtgcacatcaggatacctcagtggggaactcagggcgtgaggcacactcatgacagatgcaggaaaaacatctcttttctaactgtccagctctttaggattaggcaatactttaataatcaaccaaattctggaatcctactgccaaattatggcactcatcctacttggtgtaaaatcctgggatgatagcttataatagtaataataagacctgcttcccggtgattctctaaggattaaatcagttcatggagatgaaatacttaaactgtgcctggcacaaagtaaatgttagtgctactattatccctgctgctgttaaccccaactagataagccaagataaggtgctctccattgtttacctgaacaggcagaaaagctctatgcagctatccagacccaagaggatccgacagctctggaacttgtaatatttgcagcatgtcttgccctcttaatgtctaagaagtcaaaaaaggacacgtatgcctagaaaacatgaataattatcatctatcaaatttttaccatgtgccaagcatagtcatatttggctaacgaaaacaacaaaatcaaccgtgacaaggttttattagtaatgaaactgaggcttctggaggatctgtaactgttgcaaatttccagtggctagttcagggacagtgccggggcttgaacccctgtctctgtgtctcccagctcataaggtgtgctaccaagtcacccatgagtagcaattaggcgacttctaacatgtccagctttaaacctgtgacctcaaggcaaatgacttccacatctcattagcactccccagagccttccagccccctgtaggagagggaggttaatcagccacgcgctgaatctgcttataaggctgtttcatgtatgatttttatatcttggctcctaataatggccccgttgtaaatgattgtctcactatgatatacgggttccttaccttctaggaactgatttaaaaggaagccctagacttcttgtgcctgtagagtttattcatatcactctttgcttgctcagcagttgaaatgggatggaggaaagccccctaactccaaaaaaaaaaaaaaactttcttcccagcctgagacagttgccataattagtaacctgcagctcccttgatatcttgatgatactttattaaaacaaacaaacaacaaaaaacacagctgggtgcggtggctcacgcctgtaatcccagcgctttgggaggccaagatgggcagatcacgtgaggtcaggagtttgagaccagcctgaccaacatggagaaaacctgtgtcttctaaaagtacaaaattagccagacatggtggtgcatgcctgtaatcccagctactcagaaggctgaggcgggagaatcatttgaacctgggaggtggaggttgtggtgagctgagatcacgccattgcactccagcctgggcaacgagcgaaactctgtctcaaaaatgaatgaatgaatgaatgaatgaatgaaatactacttctccctgtcctccccaccctaagcatctgatcagacaggtagtgctggtggacagatggacagacacctaccccatatgtcacctccctcctctatgcaaacaaaaattttaattatttctagaatgacttaggagagcaagtcatgtgggatatatagcgtcagggagcgtattttcaaaccaaaaacctgggcccttattttttttttctttttgagacagagttttgctcttattgctcaggctgctgtacagtggggcaaactcagctcactgcaacctccgcctaccaggttcaaatgattttcctgcctcagcctcccaagtacctgggattacaggagcctgccaccacgcctggctaattttttgtacttttagtagagatggggttgcaccatgtttaccaggctggtctggaactcctgaactcaagtgatctgcccgcctttgcctcccaaagtgctgggattacaggcgtgagccactgtgcccagccaaacctcggcacttttatccaacaaatatttatttcgtgactattatgagtcaggcttaagaatacactagtaggtacagcaggagagcatgtagaagaggatagatgtagaaaatcgggacggcatgttaggaatatagataggaattactaaggaaaattgtatttttgtggaattctttgaactcgttactattagtaaacggtgagttttggttctactcttcaatgagtttaagatgaaggaaatcattaaatagtgctttcttttcttcaaaagttgggttgcattgcatagttaaagttctttaaattcttctctaaaccccaaggctaagcaatatacaatctagttacaatggtctgcttgctgttaccagaatctgtcaagctctttcctatcgaagggttttttccatgtactggtttctctcctgcgtggtcttgttctacccttgaggagggtaccacctcctcattgcttagttgtcagtataaatgctcctttctcagagaggcccatcctgaccatctgtgtttttttcctatcaatgctttaacaaatgaccacccatgggtggcttacataccatgaatgtcttctcttaccattctggaggtcaaaagtccaaaatgggtctgtcttagtccttttgtgttgctataaaggaatgcctgagctgggtcatttacaaaggaaggaaatttatttgtctcatgtttctgcaggatgtccaagaagcatggtgccaatgtatttctgatgagggcgtcaggcagcttctactcatggtggaaagtgaaggggagccagcatgttcagagaacatatagggagaaagggagcaagagaggggaggggaggtgccagagactttaaaagaaccaactctctgggaacaaatagagggagaacattaatctagccatgagggatccacccccgtaacctagactcctgtcatcagccacggcctccaacattggagatcaaatttcaacatgagatttggaagcaacagacatccaaactatagcagggtctccttgggccaaaatcaaggtgttggcagggctgggctctgggggcttctggggagaatttgttctgactttttcgatttctggaggccacctgtgttccttggctggtggccacatcttccatccttaaaaccagcagtgcagcgtcttcaattctgtccctggctctgctccttctctccccctcctctccccctttgtcatctttttaggtttatttgtgaccttttagatcctttgtgactgcattggtcttccttgggtaactgcgcatactctcctcatgtcaagaacttacatccctctacaaagtcccatctgccatgccaaataacacctttgcaggtttcagggtagagcatggatgccttttgattttgatttggttgtttttggtagagatgatatcttgctctattgccaggctgatctcggactcctgggctccatcaatcctcttgcttcccaaagtgctgggattataggtgtgagccagtacacttggccttttggcaccattattctgcctgccatcctgtcctaactaaagaaagtaaggtccctccatcctccatcttagcccttctttccttagcctcctaacactcaacgcaatttatatattttaattttttttttgagacaaagtttcactctgtcacccaggctggggtgcagtggcgtgatcttagctcactgcatcccctgtctcccggattcaagcaattctctggcctcagcctctctggtagctggaattacacgtatgtaccactactcccggctaatttttgtctttttagtagagactaggtttcaccatgttggccaagctgatctcaaactcctgacctcaggtgatccgccctactgggcctcccgtagtgataggattacaggccattgtgcctggcgtatatattttaaattttatttttcagtttacttggttttgcctccttctagaactagaacataagctctctgaagtcagggaccatgcctagaatcgccttccttttatctcccatcagccgaaactaactctgctgtgtcacgctgtgttaggctgtgttggctgtgagtaagagaagtctcacccaactagctgaagcgaggtgggttggaggggggatgccttgtggaagtgacaactctaggcacgtaactggctcagactctgctgggcccagatatacagatgtcatcaagagtctttctcttccttttgagcccagctctccctttgtgacccagcaacttccttccccgatgatggccaagccttgaggatgtgaaactgcccagtgccccaatctggagtccaccatcctgggtctagctggggacatccttgaatcagcctctgggaatcactgaaccaacatgagtcacttgctactgtgagatctcagaacacatggatcaggacagagggcagggctgtttccccaaggaaatccaaatgctttacaggaaggggagtggatgctggcccggcccaggcgaggatgaggagtaactgagctgcagaccattgtttagccctccttccacctgggagactggctgctggttctcattgcttctgtgggtctccaggtttctatcattacacagattagcacacggttccatgatcatggacccgttcagtacacaatgaaatcatttgcaaagcaccttggggtctgttagagaagggaatggatgtctgaggtatgctaagcctaatctccatcttctcaaagctccactgccactgtcccgtaagggtgggcagattcctccccattctataaaataacagctaccatttcctgagggcatactgagtgctgacaggcacatcaacatcagaccatcaccttcttatacctcaaaatagtctgcagggtgactcagaagctcctggctggtaagtggcagatccagagatgaaacccagatctaactggacccaagacagaaatttctagaacagaagccacaaacgtgttagctaagtctggttatgtcaagtggaatatttctggctttgggggatcccagctctttttttctctctcactctgagtatttagaggcttttattgctatttttctaaaaggcaacattagtaatcaactttgccaaaaatttcatatgaacggtgggcttttctttctcatttgctttcgcttagtattttccattattcatttggcttcttgaaccctccctatctgtaccccacacttactcttattcacccagaacaggtgtgtgccaccttggagaagatgaagccagagagaaaatcagtcagacaggaattatgttgaaaggtgactgaatacattaccacctcccaggagttgaatgaaaaacggctatttctttaggacgtcaaaccacctttttcctctctaattcatgcatatccctatacaaagacccaaggtggtgaggggctggtttttagatagtctggaggccctctgagaatgcgaggcccttgttgtaaggaaacgctggtgggtgctcactccttcatcaggagccagccggctcccctgcacttactgctttggggaagagtttttgtcaagatcatttttgcagatggttgtaaggtaaacagtcactggtccctaggatatcttgctaatgagacaccaaagatacacatggacaatggccagaccatattttgtcacagaatgccgacccacaagctctggagcagtcaactcagaatggtcaggacttggtcagtaatgcccatttttgctaaattttgtccccacttccaacgcaggaccaaccagagaaagccacatatgctccccaaaccaatcatacaggatgtcctggtctagggagcccacctccggcttccccatgtccacagcctccaatcggagcatactggaagtcatccactttcttttttgtttaaccataaagctttctttctctccacctcctttgagcctctgccaaacacaactgatggtggctgactgcctggctgcaggaagttctgaataagtgacctctatttgttattatttgggttccctttgtttatttttacactagctttgcactaggttaattttttcccacatggcttttcctgtttgtttctttgattgtttttaattaataattagtttgcttatttatttgtttattttttgagagggagtctcgctctgtcacccaggctggagtgcagcagtgtgatcttggctcactgcaaactccacctcccaggttcaagggattctcctgcctcagtctcccaagtagctgagattacaggcgcccaccaccaagcccagctaatttttttggttttttttgtattttagtagagacgggatttcaccatgttggccaggctggtctcaaactctggacctcaaatgatccaaccgcctcggacttccgaagtgctgggattacaggcgtgagccaccgtgactgacctgtttttaatttttttagagacagagtttcacactgtttaccagattggagtgcagtggtgcaatcctagcttactgcagcctgtaggtcccgggctcaagcgatcttcccacctctgccacttgaataggtgggactacaggtgggtaccaccatacccagctgttgaaaaaaaaatggtggggtattactctgttgcccaggctggtgttgaactcctggcctcaagcgatcctcctgcctcggcctcccaaagtgctgggattacaggcttgagctacttccccaggctcttcccccgtttgttaatacataccatgaccttggcctttcccacctcttaggttttgcttactttcccttctgtcctttacttatgactctgcccccttttgacctctgctaaaattatttgttactgttgttatgttattatttcatgtgttaagtctacagtgtataacttgggtttacttatctcatttaacccttaggaaaaccttacacttaaatactcaaagccttgattttgcaggtctgattgatgggcatacagaggaattaaatgaccttgtcttccacatatggtataaggcacagtagtggaagcaggatccaaatctgtgtctgtgtttggatcaacagccctggccaccatcttgattcatttctcttatctgtaattctatggagggaggttccattgtatatttttttctttcaattacagtattatttgtatattggaagcctattgtactttatctgtgtaactgtcgtagcagctagaggctagtaggactggctgaaatgtcagaggaaggagggaagaaaagggagaaaagcaggacaaatgaacgcagattaaggaaaataaaaaagagtgtttggctaacttgcataaaaaggatctcatttttctttgtaacacattactacatacagtgaccatagtgtttctctaatttcttcaggacttactttgaagatgaagaagtatgtgtatccgctttttgtctttcagaataacatactgctgtctgtaaaaatacagataatttctctcttaaattccataagctggagacactgcccctgtttcaaatgaatacagattcattttgtcacctgtgtgaaattggtgtccgtgtgccttgcttcctaggctgtccaccatgacatcagcctgcccatgcaatgcttgagatttgccctgtgactcaacccaaatctaaagcccgagtcgtatgaatccaggacacctgcctgcaaatgcatttttcatgtataggttattcactctggtctttgagattatgtaattagcatatgttgtcatagtgatgtatttattataatggaggtgttctcaggaaaccagatttaatacttttaaatcagaggccaacatggacttttaggaattccattcacagtaaattttatgcgtggtgaaaggttatggaatgggtttccatgccatgtctccccctgtcccacaaatctcagctggcctgcaaaggttccactgtggatttttgccagccagccacgctgatgtagacagaatatttcggatttatattattgcttacttggcacatcttccattggaaatggaatagagaaaaggtggcttggctgtttggtttatgtcctaaaaccttatcgtaatgtgattctccttaacagagggattcgtaagcttaggactgatagagatttggcttttctgctgttggattgatagctccttgactgctgaagccattgcccatctgttcaactgttgtattcacgaggaggttagacccctgacccaaggcccaggtacctggctttcctcagttgggatcagaaggccacaaagttttcttatattttaagcatcaaagtagcaccactgtacagcatctttacttaatctgccctctttcacgtgtgtgcatccctggcatgcttaaacaagaaaggcaaatgagagagagcgagtgagtgcgagcgagagagccctgaggtgccagaaggctgtggttcctttgtgtctacagaaaagatataacgattgaattagactcttaaatatctgtggatgtcaggttgaatacaagcagctattcagtgttttactctggcaggagaacaagtcccctggaggtcagaagccatgcaggtccctggaagtgtgagcagattgttaaaatggtatcaaagatgggctggcatgaggccagagtctatccttgatgctcacctgaggtctagggctaaactcttgcctttacctgttccatgcttagccgttcctgctttttgcctagaacctcagtgctattgctcacacagacccagctcatgtccccaggccatgaccactgcctccccttctcccacctgtgcaggtgttaagcatcagtacataactgaggagtaggagggcagcagcccaaatctttgatgaagaacctctttcgtatcaacttatgctttggaacgagacactgttggatgggaatctggcttctaacaaactgattggttggactcatgccttattctttcggagccttagttttgtcatgtgtagaatggggagtattgctagctattcccatagggagtgagagagagtgtaagtaaaatgcaatggcaggcacagggatggttgccattatcagttacattattatgaggattattttctacctagatcaggtataaggtggatgtattattggcattcctaggactgttttaaaggaagtacctatgaggcctcatgataagccagatgtccagaagccagcttgagaccagggctcctggtcacttaaaagatgtttggggctgggcgtggtggctcacacctgtaatcccagcactttgggaggctgaggtgggcagatcacgaggtcaagagatcgagaccatcctggccaatatggtgaaacctgtcactactaaaaatccaaaaattagctgggcgtggtggtgagcacctgtaatcccagctactcgggagcctgaggcaggagaatcacttgaacccgggaggtggaggttgcagcgagtcaaggtcacgccagtgtactccagcctgggtgacagagcgagactccgtctcaaaaaaaaaaaaaaaaaaaaaaagaaaaagaaaaaggtgtttggaagccatgtcccatgaattccaaatacaattgaggactctataaaggactataaaaaaagttgtaataaattatgcagacccctcagcagttgactcacctctctggtgctccaggtatttctcagcgtgttcggggtctccctgtgttacctggacagctcctgccatcattagcacacagccaagattcctcgaccacccatgactctggatttatcatcctcaagaattgggggctgtggaaaagatgccaaatttgttcttttcagatttaggttcttctgtgataaaaatagacttggtaaagaagcagatatttctttaatacgtgtatatattagactgtgaatttattcatcttccttattcatcatataagtaaattatatgattggacccaggcataaaacgtgatttgactcccccttgcccatcacagttctggagttcacatatcatttgttactttgaaaaatgaacttttgttatttgattatggtaataaataatatacatggtagaaggagaagaaaatgaagaaaaatttagaaacttggacagaggaaaatgaaaatgttctattaattccactagcatgagataatcactcttaatattttgttgcatgttcttttctttcttctgagtgatagcatttttttcaacaaattgggctcgtaatatataggcacatagatatataattaaaaaaacaagaatttctcatgtcattaaacattgcttgaaaaaacatactagtaatttcctaagattacaccatgtaaatgaattgtattttatgtaaccattccctagtgttggatagctaggccatttataatttggacactattttaaaaaataactcaggcttattttactatttatttttgccttacactttttgtaaaagtaatcagagcagtaataatagatgactccccaaaatccttttgcctctaatgattagtctaagcccataatgctgtgttccttgccagtgattggtttagaaataggtatgtgacccagttctgaccaatggatatggagggtgcttatgaggaaggtttcctactcctaaaagagatacacaggaagagagaccttctgcttcctctggacactggcgcagcctggactagcagttgccagcttgggtttggacaacctccgaccttagttgaaaatgaccctgtgtaggacagaggagcaagtggaaagaacctgggtgcattgtggcattttagagccactgattcagctgtcctatgggcctcctaacccgaacctccactggtcatgaaataagctgttagtttggtgcaaaaggaattgcagtttttgccattgaaagtgatggccaaaaccacagtaacttttagcaccaacttaatattttgagttgggtttgaatcacgttgtctattacatgcagcaggacacatctctaatcacgcgagaggtctgagcaaacgtcttcacatttcacactgcagatattcttacaaaaggcaaagcagagatccagagaaattaagatctgctcaaggtcgtatccagctttgggaaccccaactattgcagaaatttctgaagtcgtcatattgctacttaaagcaaaatgccttctcctaaatccaggtagagagaaactctcaaaggccagggtctggactcaagatgagcacaggatttagaatcagaaagtgtgagttcaaattgccttcggctcttcacctgggtgggcgatttgaatagagctcacagccctgaaaaccctggttttcagattctttattggtaaatgaagtcagcttagtgatatgagaattatgaaacataaatccctttgtaaaaatataaaataatcttacaatcatcatcgtcatcctcatcatcgtgttccttcacaccagcggtatttatggtatttatcaactaactgctgtgtactatgctctattgaaaatgttagcaatatagtaatgaacaaaacagatgttatctctacccttatggtttttatattttaataaaagtggcagaaaagaaataggtaaaacaataaactgagctctttggagaagaggcccacgttcttttcagattctgatttctccgtgatataaatagttttttaggtgatcacttgtttttaatgtacctacctatctatacctttctctctctctctctctctctgtgtgtatgtgtgtgtgtgtataaaattacatatccagtatgaaacctaaaaataagattttggggcctgtgaatttttttaacctttcttaacctacatcctaattatttgatttgacattgtgatgaaacatactgttgttttgaattttggaaatagaccagtgattcttcagtagggtcgtaaggtcccgtcaatgcagcagtcaaattttttcttggtgggggggatgcatatgtgtatgtgtgtgcatgagtatcttgataatttagaaagattaattaaacattgatcatctatgtgaccacatttaaaatgagcaccaccacatccaaatgtctgagtttacattttgtgtcggtacttgctttggcagaactctgtgcctttccccaagtcttctgtgaccttctcacctggcctgcatcctggtccttatcaaccgtattttacagttaaggaaactcggctcaaactagcttcggggactcgctgtggccataggtgccctaggctgcagtctgagagtgaaactgaggtctcactcccttcatagtctgctctccgtctctgcctcatctggcttctcagggtggtggggcgtgggcactaatttgatttgatcacttagagacaacagcttacaaaatgctaccgagcagtgcctgtcctttctgagaacttgatataataacgttggcttgatctcctcagcctgtgtcttgagggaacaagtaaattaaacaagtaattagatccataatgtttttagaagttagaagatttaaatatatgaatctcatctgagtgtgcagccttttgtctgctgtgtttcctgccaaaagatctcttgacaggaaataaacattaaaataatctttaatcccttgtttggtctattaccattaacaattgatgcactttaattttgtggggttttaactacaaaatggaacggctaagtagtgataattgggtttggaattatacggtcatttatatcaacagagatgcaaggggctgggagggagggtgattaattatttactatttcctggctgtggttcctattatagaattttctgatatgttcttctgtgaacaattatcaccaaatgaaagtaaacaaatctgtgatttgaagccttatttagaagttagtctatatttaggtgatgtgggcttgattttcacagaccctgtgggctgtctgtgtgtgttccttttctcagtaccccagctctgtattcgagcgtggttatctttgtgcatcttaaaatccacaatgcacagcctggggagaagccttggttttgccagggggaaaaaaagagaaacacaacattgagtgaggtctagggtgaataccaaaggtctgttttgaaatgggggtgtgggttattcttctctctttctgatttgcttcagtacagtatgggatggggaagaatcaaaattattatgtcaacatgaggatgaaagttatgctctgttgtttctcataacatttgtgtgtgtgtgggtgggtgggtgtgtgtgaaaggtaggatcacctctctgtgcctcagtctccccatcatccttcggtggtagatcaatgctatctgatgaggccttttttgggatcacccactccaacatgcatgtcctttctctgtcccctcctggtgcctgtattagtctgttctcacattgatgtaaaggactacctgaggctggctaatgtataaagaaaagaggtttaattggctcatggttccgcaggccatacaggaagcccagttagggaggcctaaggaaacttaaaatcatggcagaagatgaaagggaagcaggcatgttctgcatggctggagtaggaggcaaggagcgaaggaggaggtactacccacttttaaacaaccagatctggtgagaactcactcactgtcatgagaacagcaagggggaaatcagccctctgatccaaccacctcccaccgggcccctcctccaacattggggattgcagtttgatgtgaaattttggctgggacacaaatcccaaccatatcggcacccactgagcacatcctcgtggatcttcctggctctccttacaaggggttccttccaaacccaagcgccacaatccttaggcagattgctctgacacagaagactggtgagttctagacttgatgtgtttcatgggaaacaggaagacatttaggggaggctgtagatacacagccgctctgtttagggaaggctgtcgatacaccgctgctctgaccatcatggcgtctggtccatgctcagattctggagtgttagggtcttcgggcacatggtggatgagcgttttgcttcgtgtactcatttatttctgaaaataatgcagccccttgtagggctttctggctaattgagtggtgccatcattcatgcaattgcgcaattcacacaccaggctgccactttggcccctgcgtcaccttcaccaccacccaatgtgtcctgctcatcactgaggtttgtcatttttactctgagtctgtccattgtcatcatctccaccatcaccccttttgttttcattgccacccttgcctggggtgagtgaagacgctcttctctggcttccacccttccaaatgcccttaacccacagatgggaagaaaatgaggtggggggaaggggactttcttgcttcctcatagttctcccccatcctgtaaaggagcctgtgcttcccgactcccagggccctgcagcatgtcaagaacaatattggacaagcttgtcagtgagggtccaggtggttccctgccactacgatgcatgctggggtcagtaaaaggagaacacagaagaatcagcagacccagagtctaacccctcctctagttaaagacgtgaccctggccgggactgaagccagaggcccacagcctactggacctttgtttcttgcagtcaggttctgatgacagattttagtcccctcttgaatttccttggatgtgatggaagtgattctcagtggacaagaggtcacattgccttttctagcttggaaggtggcgcaaataactgcttgaggctccctctcttgggccaagcttgactctggattttcattgttgtccttttttattaaaacaggttttgtttttttgtgtgtgtgttattttgttttttgtttttttgtttttcgggggctggagtagtgtgcagagcctggcggtgattgttctcattagaaagtatagtgtaatactcaataaattacttttgttctcaccttgggaagtggactcagaggccaagtgactttgatttttcactttatcctggagtttctcaaccttggcactattgacattttaggccaggagattctttgttgggggggatttcctgtgagttacaagacattaagcaacatcactggcctctacccactagatgccagtagcatcttctatttcctcaagtctcaaaataccaaaaacatttgtagatactgccagatacccctggggaacaaaatcacccctggatgagaacccctgctttatcctcttacagttttggttctttccatgagaaagtatttttaatagcaaagtaatgaacaagaaagtattaataagacccaaataataatataaactactactttactaatggtcattatgtgccatgccctgctctaaacacttgccatgtagtcactaatttaatcctcacaagaattctgtaatgtagtgtagtttcccagggcttccttgaaaacgtgccatagactagatagcttgaaacaacagagatttattctctcacagttttggaggccagacacctgacatcgaggtgttggcagagttggttcctcccggggctctcagtgaaagcctgctccgtgcctctcctccagcctctggtggctgccattaatccttgacattcgtcggcttgtggcagcagaaccccagtctccgcctccgccttcacatggccatcttcactctctgtctttgctcccttttcctatagggactcaagtcattggatttagggctcactggaatccaggatgacctcattttaccttaacaagttgcatctgtgaagattccatttctaaataagatcacatgctagggctgggcacggtggctcatgcctgtaatcccagaattttgggaggccgaggcaggcggatcacttgaggtcaggagtttgagaccagcctggccaaaatggcaaaaccccttctctattaaaaatacaaaaattagccaggtatggtggtgcgtgcctgtagtcctagctacttgggaggctgaggcagaagaatcccttgaacctgggaggcagaggttgcagtgagccgagattgtgccactgcactccagcctgggcaatagagtgagaatccgtctcaaaaaaaaacaaacaaacaaacaaaaaaaaaacaaaacacatgctggtgcacacataaatttggaagaaatgctctttaacccagtatgagcacgtggtattcttatcctcattttacagatgaggaaattgaggcacagacagattcaataactacgtgactcacagagataaccgtgtagcagaatcaggaattcagcccagttttttcagttgcacagcctgagctcctaaccatcgcgcctggggttctcaaaggctcgtccccaagcgacaacatcagggtcatctgggaacttgttagatgtgctcaccctcaggctcgccccaccccgccagacttcctgaaccagaaactctgggagtagggctcagcaatctagttttagccctccaggggattctgtggtgcctaaagtttgagaacttctgatcaaaaatgccagataagaaaaaaaaacctttcgagacatcatttgaatcaattatcaaatgtttccaaagtgcacttgctttgcaaagcactgtactactcatctctgcctccatcggagcgagttcaggagagttgtgtttacttttctaaaggagccttttccttcccattttaccagtgcccaaaagtcttagaaaaatgacaatgttcatatatttgcccacatgaagatagaaagtgtcatgtcaaagataaagggagaacagcattttctttttttacaagtcactcttacttaaacacacagcatgactctccttacacatttatttcggaagagcaaagtccgggtccccaggctcaactatcagccgccttctcatcccaagggctgtcaccaccagaaatttaacatgctgttagtgcatgcaaaaaaaagcccagtaattgtagggctcatcagtacattgttaattgatcctcatttcctattattttacctcaaagcaaacacatcattcaccatagtgacaccagagttgtttatcttctctgtgcaagtgtgtgctctttttagcaagctttttggatcctctgtttcagagggcctttcccatctgtttactattgtggactgtgctgctttttttgtttttaattacaggttatataaaatattgtcagcaggagggaggttattattaccttaaagaataagtggtagatgcggactggccactgtgagcccatcactaaaatgcacttccgtacactaaaggtccctcttccctggcagacagtggttcattttatttgaggaggtatgttgtgggcttggggaaacagaaggaaattggagacattgatatgcttcctgagaggtggaaggggccacttaacacagctttcatttttcagttgccagtgggagaggagctggggtgggcatataatgagtaacattcaaagctccttctgtctttttttcagagaattcacaaaacaactcagggcctcctggtcctgcaaaagtgtttactgtttatttgtgttgtttctgcttgttttgcttgccaccagctccctactcacttgggggaaaataacccatcaaaggaatagaagctcaggataaacgtttcagacctttcagtaagatagtaaaatttctttcattcccagacctctctccaaaagaggcagccatcattaaaagtttgttatggattcttccagaaacgttctatgcatttagcatcagttgcagatatggatagccttttcaaaaaatgcatgcaactgagactattggctatgttttgtttattacctactttttccatttaatagtatcttggagattatttggtaccagcacatgtagctcaacctcctaatactgcatgacggataatatgccatcacatggtgtcatttaatatattcattcctatttatagacattgaagttagatccatgtcttactattacacatgacttagtaatgaatgttcctgcatgtatatttggtctgcttgagcaaggatattgggagggaggatttccagcagcagaagtggtggaacaaaggcactgtgtacacctttgaaacaattaacttcaccaaaattactaaactgtcctctagaatggttaaaccaatttcctctctaccattcacacgtgagaatgcctgtggccccccagaaattatctccagcagcagcaacagagaggactggaatgccattgacaggtcccacaagtcagcaatcagcacgccattttttaaaatttatgttgctattgtatcgtaaggttcttctgaagcgaccacttcataacactgtgtagtccaatccctaagctgggcaatttttttttcccctttcaatacatcacattgattttctgtatgactttatctgcttaatacaaagtgggattgaacagttatttgtctggatttgatcattccttattaaacatttatgatttagctttcaccgcggcatcttcttgtaaggtgtttcttatttttatcattttccgtaaaggtaggattgtgttgacagccctgtaataaatgtctcttggaagagatgtgttgctgagaggtggggagggggtgggggctctgtgcatggaatggggggaaaagcttcagggaagggcagtgcaaattgtttctggactgatgccatcttttaataatagtagttaatagactgggtacaatggctgacgcccgtaatcccagtgctttgagaggccgaggccggtgtatcgcctgagtccaggagttagagaccagcctgggcaaacagcctgaggcaaaacctcatctctacaaaaaatacaaaaaatcagctgggcgtggtgatatgcatctgtggtctgagctactcaggaggataaggtgggaggatcatttgagcccggtagatggaggttgcaatgaaccgagattgtgccactgcactccagcctggatgatagagcgagaccatgtctcaaaataatgataataattgtagtagtagtagtggtggtggtggtggtggtagtagtagtagtgaatgccctgactttggggtttgcagtaagctaggattaagtgcttcacagtgaggcacagtggggagctactctgaggatgaattgcctagtaaataagtgaggtttgtataaccgaggccagatcttagaacctcctgctatctgtacatagaagaatgttttagtcagaggcaaggcaaggtcaccaggattcactgagagtgttggtcagcatttcatctgcatatacaggactggaaaataagagagcgcaatgagacatctagtttttttctctttcgtttgttctgtttcccactgagagaattttctagctttatgtggagaaaacagtattggaaattattactcagttcaagaaaacctcactgagcacctaccatgtaggtgctcatcccgataccactatcaggccctttggaccagttgcaaggatgcaggatgaggaaggcaatgtgagaaaacagaaggagcaccaggcagtcgtgggcttgatttttattttactattttttaaaaaacataaaacaacatacattcatcattttgctttctttggatgaagaattgagcctggttcagcatctcttgcaggctgtaattgagggtggtcattgactggggctggattcgggaaggatccacttccaagctgcacagttgttggcaagatgtagtgttttggtggttcctgggctctgggactcagctttttggctgttggttgttggctgttgccacatgggcctctgcaaaaggcagcttgtaacgtggcagctgacttttgtccaagtgagaaggtgagagtgcaagaattggtgagagagaccgcagccagggtgtttttttaacttaatcttggaagtcacatcctatcgctttggttttttgactgagattattcagtactgcaatagtctccctttaaagtggacaattcattggcttatcgtatagtcacaaacttgtgcagacatcaccactatctaatttcagaacatttttatcacccctaaaagaaaccctgtacccttcagccagcattccctattttatacccccgatctcttgacaactactcattgactttgtttctatgactttacctatttcgggtaattgatataaatggaatcatacaatacgtggccaactgacttctttcatttaatgttttcaaggtttgtgttatttcatgtattaatattatgttggtgcaatcacttttgaaccaatctaactaatacttcatccccttgtatggccaaataatattctattctatcaatatattatactttgtttatccattcacagttcatgtcattcccactttctggctattatgaataatactgcgatatgaacatctggttacttctggctcttatgggtaacacttctataagcgttgccacaggttgcttctgatttctattatgagtaatgctgctatgaacattcatatacaagttttagggcagacttctattttcattccaatatctctttatggcatgtcttagcagtgatgtctatgacatccaggatgtgtcttgacatgtctgacatcatttaaataaaaataaagtagggaaagaaaacagatagtgattgtgtgtgtgatcagtgatggcttttgaggaggtgacatttgaactacaccctgaatgaagagagccatgcaaagacctcagcaaagaaaatctcaagcacaggtgcagcaagtgcaaaggccctggggtggaaacacactcgatgtgttcaagggagagtaagtggtgaatgggtttggagccaacagggataatagacaacgctatcaagaggggggccaaccacacatgtgcagccactgtatgacgtctggattttccttgacttatggtgatcactattgggaggtggtaagcaaacaggtgacataatttgaatcatggttttaaaagacgccatggttgccatgaggaggacaatgcgtaggaggcaggagtgaaagctaaaggatatgctgggaggtgaccctggagttaaagagagcaactaaggtgaccaggtgacaataatggagatagagaaaacaggatggattcaggaaacatgaccacactgagcatattcaaatgtaattgtcagttttcgtgtctccctcccactggaccacaagcccctaactcttcatgtacacaccctgactcccagtgtgggctggccacccaggaggcacccagtttatgtgtgctgcgtgagtgatgtggaatgactgcccacgtaggaagtggcaggttggagaaaaagcagtcacagctcctggctgctgtggctgctttgagcttcttcctcgatcaggctggatcattaccagcctgtaccctcaaaggatgcccttagtcctgtcccctctcactagcagggattccaagcttgtaaataaagtctcccacttaaaatgtgagcagagtgaagagctggcagtgtcaaaactctgtgtccagatgttttatgattttcccttttccagatgagcccggtgtatccgtatcagtgtgtctaggaagaccaagcatgccgaacggccagcagagtagaaactctgtgtgcccatccattatgtactccctgaattaggctccttgaggctcaattattaaagtgggatttttcttaattattaacagttaaaaataggaaaatagatttcaaggggaaaaaatttgcaggcaacaagagtccaattctaaatgtgtgcatgtgcgtaaaacggaatttgccaaacatgaataggcacttacaatgtgactggaattggctctgtcatgtgtcagcctaatagcctaaaccctggttcaatacaatgaacttgggaaggtttgcttaatgaaagaactgacgttttctgtgcagcggctgcattcatcagcctgcatcctgttcattacactacaaagggctgccaatgggaattggtaggatcatctattaggtaaatgcgatggggacaaaagatagcagagcccggggctttgtggaattttctgtggtggtccgggttcctggagtagggagctgtgatgacgggcaacagatttccaagttggcacgcgggcttctggagtcacgggctgaattccggcactgccacatcttgccacgcacatcctaagggagtgtagagaagagagttttcagttatgcatgacactgccttacccattgtggattcagtagggatattcataactgtgaatttgaatataactattaaataattgaattattattattgagttactgaatataactattgagttttccctctccatctgggcacatgggaaggccgtactttcctgacatgtgatttgctgtggcgagtggaatctgggggcaagagacgtgtgtctccttgaggcagaaactttaacagattccagcctgctgcatcataatctcctttccctctaccacgctgactggcagtattccagattccgattgccctgtcagggtgggtcctagtggtaggacaaaagcaagaatcctgagctgacccaagacacacatggaaacattaattgtgcttctctgatgtggctttaagatacttgctctgtcgcccaggctgtagtgtagtgattccatctcagctcactgcaacctccacctcctgggttcgagtgattctcctacctcagactctcaagtagctgggattacaggcatgcaccaccatgcccggctaatttttgtatttttagtagagatggagtttcaccatgttggccaggctggtcttgaactcctgacttcaagtgatctgcccaccttggcctcccaaagctctgggattacagacgtgagccgctgcgcctggccaagatactgagatgtgggggccaggcacagtggctcatgcctgtaatcccaacactctgggaggctaaggctggaggattgcttgaagccaggagtttgagaatagcctggttaacatagtgagagccccatgtttctaaaaatttaaaaaaattagccgagtgtggtggtgtgccacagtagtcccagctactcaggaggctaaggcagggggattgttggagcccgggaggtcaaggctgtatagtaaactgtgatcctgccactgcactctagcctgggtgacagagcaagacactgtctctttaaaaataaataaataaattaaaaagacactgagatttgggggttacttgtaactgtgtcataacctggctccttactgccatcggcatgcctagagggatcccagttttacacatcagaacaacccaagccccagtgtgtcacgccattacatgcttacagcctatttttacaaagtttgaatattgtaatttgcctttaaaaaattgttttaaagatctgcctaggtcagcaaattttatttactctctagaaccatttgattggggtactgccttaagaaataaagcagattccttcagtcgcatgtgggcctggagtcactggaaaatgcagacaaaacaagatctgctgattggcaaggtcatcttgggaagggccatcgtgcagtaaagagcaggtccattaattcaggggggatttacatcagttccatctgcctctttcctaatgggactgtttggttgtgttctttcctggagagattagtgattgaaaggaggagatctagaaagaagagataaaagtttacatttaattttcatgccatgcagcgttctacgaaggcttcctaaggaggctccatactaaattcagacataagtcagaaggcagcttctcccaagacactgttgatgtccagggggtgacagttccatcacaaaagggggttaaaagggtttaggggaagtttagttgtcttccttttatctctaactctaaaacccaactgctggctgaattaaaagtctcttacataatggtcagaggagttttgagtatcggatctttgtgtacttgctttttaaattcagtcacgtcttaaatagtacttttcactctcctcctctccacaccactttatgtgtttgctagtagcttccatgaaactctatgggtgaacatgtctgcaactctttggcatttaaattttaggtttctgcccctcgtagcagactatctttctagaagcagagctgtaagtctcttttaacaccattttcaagcttggacaggctgacatttttattgaatgggttatctcaatatatatctacttttttgcatcctactttttttagaaaattaaaaatgatatgatgggtgtggtggctcacgcctgtattcccaacactttgggaggccgaggcgggtggatcacaaggtcaggagttcaagaccatcctggttaacacggtgaaaccctgtctctactaaaaagtacaaaaaattagccaggcgtggtggcaggcacctgtagtcccagctactcgggagactgaggcaggagaatggcatgaacctgggaggcagaggtagcagtgagccaagatcgtgccactgcatcccagcctgggcgacagagtgagactccgtctcaaaaaaaaaaaaaaaaaaaaaaagataatgatgaaaataatagaatattgatgagaacacccattactctgctcattgttcaaatgaactcatttgagagctctctcctttgtttctgtctttctctcgcatcagcttgcatctgtttgcctatgctataaggcatcagtggttaccaggcagtgttgcattttttccatcccatacctctgtgtgtgttccttatctgtttctaggatgtgccctctgccccgtcacatcacactctgtgctgctctcagccaaagctcttcttaaatacactagccatcaaaaccatacaacttggctgggtgcggtggctcacacctgtaatcttagcattttgagaggccgaggcgggtggatcacttgaggtcaggaattcaagaccagcctggccaccatggtgaagccccgtctctactaaaaatacaaaaaattagccagctgtggtggcacatgcctgtaatcccagctactcgggaggctgggacagaagaaccactggaacctgggaagcggaggttgcagtcagccgagatctatgccattgcactccagcctgtgtgacagagcaagactttgtctcaaacaaacaaacaaaaaacatacaacttaactctcatacccccacgcctgtcttttctcctgttcgacttgactcctcttgggaattccgtaagtactttgagggcaaggaccacaagataaatgtcgtaaggtaaccaggaatgacattccaagattccattctttcctttgtatatccactcatcattcattatattcttactctgggctaggccctgggaacagttgagtaagaacaagcaggaacaaacaattagaacatttagtgtggcaaggggcgtgacaaagttaccaagagaggtaggtgagagacaggagttgttatctgcggggaacaggtgaaggagtgacagcagggggtgaggataagaaggaggaagctttacccctgagaagagcaggcatcagatgggctttggaatctacatgggtgtttgtaggtagaccaccctggaagttgagtgatggggaataaaaggaagaaagtgcattctgaacagagggaatagcaggtacagcagctcagacatgggcaccttcagagcgtgtctgagtcttcctgatgagacacgtggtgttcacttgataactccctggcaggttctcttcatcgggcctccacatagggtatgcgaacctcttcatgtttttaaaagggagagatttaataaaggcaatttggtacttaaaaattgttagaagagctaaaagagtagttttgaggttgaccttcagaacggcttcctgaataatacagaagtgaccctccaggaaggcccttccactgaagctacaactggagctaagcagatggataagccaaaaccacctccgttgctgtggccccatctccaccacaaggaagctggagaagggaccccagaaccggaagacaaaaaacttccttcacacactcccttgctaagaggagaagccccaaagaagctggatatggcccttccctcacatttgctgtcccaagtgtcccatggcagtgcctaagcaattggtgggatggatttgtgtctataaacaaagttgcaagggagtctggaaagggagttttaactccaacttcttcaactagaatggtaggatccaggggcagcattgctccccaggggatgtttttacaatgtctgggatattttttagttgtcagaactggaagcaggaagaagtgctactgtcatctaatgggtcaaggccagtgatggtgctgactatcctacaatccataggacagtacctaccacaaagagttacctacccccaaaatgtcaacgtgcccaggttgagaaacgtgacctagctggaaggtgaacaggaactaaatgagtcagtttcagatatccaacacaaatacgtcacttgtttctgttccaaaagtattataatttttgtttgagctaaaaactagttacagttcattggataattgcctttcatcccttcaatatgtgttcccttgaaatttgcatccatgcatcccacatggcacccctattgattatttcagtgactcagaagacttcattattcaaaataatctctaataagatgtttagggagaaggaaaaataaagtttctctccacgttacgtttttttcttgcacatgtactgctttttcataagcacaatcttattaatagaacaagtcctctcaaaatggttgccttttctcccttcatcctcccccaccagtaatgtagagctgttatttggctcgtttttctttttcctccagaggcaggaagagggaatgaatggtggccaagaattttaaattcctgttcccggccgcccccggaagctccatctttgttgtgagggcttctctgcgtcagtagaggccagctgagctcttattcaccccttattctctggttccctttcaccagcaggtccagctctaaccacagctggagtttaggaaggccaggcagcgtgtgttgaatgccagccactcttctacccagggtcatatccttggatgtttttctgtgcatctgtcttttccgaccctcccgtgattctggaaggaaacacctttccaagctccccagtgaccctggttcatcccggaaatatgcaggaaaagcattatgagcattgcagtgccacatgctgcattggtgtgttacgttatgagaactattagggctgatctctgagaaacttaccagtggtgtgtgatcggaaatcatgtcaccctctgaatgtgggttatgggataaatggctaggtacacaggcttcagagtccagccagccccaggtttggattacagatggttgctgtactagatgaataatgtccccccaaattcgtgtctatctggaacctcagaatgtgacctcatttggaaataaggcctttttaattaaaaaaaaatttttatttaaaaaacagagatagagtcttgccatcttgcccaggctagtctcaaactgttgggctgaagcagttctcctgctttgacctcctaaagtgctgggattacagacatgagccactccacctacccagaaataaggtctttatagatgtaactgaaataaagatagagatgtgaatgtgatcgtactggtttagggtgggccctacatccaataagaatgtccttagcagagacagaacagagacaccgagagaggaaggtgatgccaagacagaagtaaagattggagtggtgccatctaccagccaaggaatgccaaggctgtggctacaccagaagctggaacagagcctgcaagcatttctcctgcagaacccccagaagggactcagcctgcagacactcagatttcaaacctctggcttcctgaactgtgaaagaataaattgctgttgggccaggtacagtggctcatgcctgtaatcccagcactttgggaggctgaggcaggtggatcacttcaacccaggagttcgagaccagcctgggcaacaaggcgagaccccgtctctacaaaaaataccaaaaaatgagccgggtgtggtggggcatgcctgtagtcccagctacttgggaggctgggatggaagcatcatttgagcctgggaggtggaggttgccgtcagctgagattgtgccactgcactccggcctgggtgatagcatgagactgtgtctcaaaaattaaaaaataaaacataaataaatttctattgttttaagacaatttgcctgtggccctaggaaaccagtatagataacttgtgatggtttagcttatttagtacaacaaccctgccccttctagtttttatgataacctcattaattgccggtactctcagagccctgattttcttacctataaagtagagattccctatctcatttggaggtgattttaaggcacaaatgagacagtgtatgtaaagcatttggcatagtgcctgattcagagtaagtgaccaataaatagctacccttactatttagaatgctattatttagaacataagtatatttaagaaagcaccatcagtattcaatttgccttgctaataaaaagggatcaagatatggattgtaaagtagaaaaatacatgtcaattaaatggatttacatcttaaaaagtggtgaggtagacacacaggcactactcacttcattccttctcatctcaacccgttaggatttggccttcaactgggtagtggaaaaaatatgatccttggcagtctactacgcaaaagcaggaacatcatctgcttttgggtagttaagagttaagtatcactttgagctacaggatcatgattaaaaagcattctgttatcttacttcacaactctccacttttgtaaaagtttaggataccggcagggcagcaaatacctttaaatgattttatttaaatgtcagatttaattaaatccatgaccagaagacaaacccaaaggaaattttcagggagctttagaattttccttttccatgttcaaggtgataaccgtagcataaaactgtcccaaccacatgcaaatgcaagcaggggcattcatcatgaaaatacagctctcaaggcggaagtgcttgttaactttgcactctatagccaagtgcgatgatcagaaaatacatacattgaagacaccagaaaatagtgtatggattggtgattttgactaagactggaatgtgggtgtgtgcactcctcatgttccggtttctgtgatcattcaggcatgcacaggtatcctgatgggtagccaggtcattaggcccagagtcggcagtgtagcatggcaagagaagtcattgcatctccaaactgtgcctaaattgcctgtaatgggttctttgcaacttgcagaaccagatcttaccatttgcaaggagaatagctgaaaagatacttaaataaaagtgatcggatgaaattttaaaaacgggaatgaccaaaaagattcccagaggaccgttactggtctgcagccccccattttagggtctggcatttgtactgattatggcctgacagctcttgagtttccaatgataacagccatctgacttgatcggagttctatggattttcactaaaatagaatcatcgccttggtgatggatagaaaaagtaaagcaatacatcctgataaatgctgtgccttcctccttcgtctctctggcggtgaccttgtgcaatccataagagggcaaggctgagagccccggccaccgccgccgtgtgtcagaacttggaaatttaagtagctttgaaacccgtcaatggggtgaagggggaatggcctgagaaagcaatggatcatgcttagagggctcagagggaaatagggtacgctgaaggtcaacgtgcagacatgtcctgaaggaacagctcaagtcctcattctcattcacgggaggctgcggccctgtgaggtgagatcagtagaagagtacaataaaacaggaattttcagagcatgtaatttcttcttggaagtgaaaggcactggagaatggtgcagaataagcactagccttagagagaggatgccctgccccagtctctttctctgagtagcagagagctggctgtgctaggaaactcttcgcctctctaacaccacgtttattctccagcccagttatcttagccaactgtgaacattttgaacactgttgatcatcggtaatgacaccagcaccataacacgaaacccctctaaaacagggcttccaggaaactcacagactagttacatccccaagccttgcatacttgattggaaagagaagcttctggatggttgaaggggaaaggagttagacgttggcaggcacccattagtgttggttacgacttgctaaaagaaaatattaagataaaaattagatcataaatttggagccaccattacgaagcctaaagtgcaaattgccaaacaagtcaagagactcattagcattttatgtaaatcagttattactgttctccacttccttaattatccatgttatttcaatacaaccctttctttgatgtcccaattctatatttaaatagtgcaagatttctatcgtatcctcccgcagaggtttgtgccatgcaaaaaacatgccaagagcagctattttagagactacagggaaatgtttaattggttcatcccatttgagttatgagggtgtattactgagcacataaaatcagaaacatggaaagtactagcttggagaagtttactaaaacctgcaagagaccgcttgaaattttgcccccaagactttttggattctcgatgggaaccgactcaaagagaaatttcgcaaacttcatggaattttgctaagtgattgatttataattgaaatatttggaaataaaatccaacagctctctttcctttggctcagagacttattgttttggttggatgaagagaacacttgtgacagagggaggaacatagggtgcataagagagatgtggggaagcactccccatccaactcgttccaaccagttcatcttttttttttttttttcttttttcgagaaagagttttgctcttttccccaggctggagtgcagtggtgcgatcttggctcactgcaacctctcccttccaagttcaagcaattgtcctgcctcagcctcctgagtagctggaactacaggcgtccgccaccatgcccagctaatttttgtatttttagtagagatggggtttcaccatgttagccaggctggtctcaaactcctgacgtcaggtgatccaccctcctcagcctcccaaagtgctgagattacaggcttgagccacagcacccagccagaacttcatagtttactcttattattttctcctaaccactaggttccacacttctggccacctgcctttatctcctgccccataacctaacctgttttaaaatacttattaaacaaagaaaaataaacaagaacaaatggagaatctttcactatgactgcaactgaaaagaggagtaatggaaggacatgtactcttcccatatatttttaaacaattactgtatctgatttttcatttttcattttttttttttctggaagaaagagcagatctggataaagtcagtatacaatgtggtctttggtgacagacccaagttcaagaccaaggtgtatgcatgggtttgttcaagttgtctacccttattatcccctcagtgaaacatgattaaccatgcttaccttgaagagttatcttaaatatttgtgttaatattatatatgtacattacatggtaagtgctaagtaaatggtacatgtgagtctttgctctaggcaaggcgctgtgctgaatgtttacatagatgatcggatcctcatattggatcctcaaaacgttcatcaaaatgggtaggattatttttatgtatatttaacaggtaaggaaaatggggtttctggaggtgagtgactcactcaagatcacgtggaatcaagcagagaagctggggttttaattcagaagttctttaagctacagctgtaattgagacaagaaccgtacactgtagtaagattaatgtaaagatttaaaaaactgttcatatcgttcatctacataaataaataatatttacagaaactcatctctgcagactaaagtactttaaatatttaatctaatttattggttatttatttaacaaatacttttatgggccttgccatgttccaggcacggttgtaagcacttacaactagtgactcatttaaccatttcacaaatatttattttgagagcaagcacgggggtttatgtgatggctccacagagcagtgaaaagactcccgccctactgctcgcaacctcagatgtccctgggcactagcccatctgtatgtctttaaaaaaaataaattaaatttttaaaaacatgactttctggccaggcgcagtggctcatgcctataaccctgcacttagagagggcaagacagaaggattgcttgaggccaggagtttgagaccagcctgggcaacatagcgagaccttgtctgtactaaaaaattattaaaagaaaatatatatatttttttaaatcatgacttttctgatcatacctgtggcatactcattatagaaaatttggaaaatgtaagaagtcataaagaagtgggaaaaaatttaaatccttctctgtcccaccacaaaccatttaaatcaatccaagattttagtggaaagggaaagcatatgatctagtacaaagaattttttttagcttcttctccgctgcttgtttaagaatctcagagtaatccagacgttactactccataagcaaatctgggacagtaatcagacaaccagacaaccagactgagagcccccaagggttcaaattcctgagcgccgtgtcttctctatagcttgctgtcttgttctatttggatataaagctaccatcaagcagaagaagcgggatgctctctacagagtccgaaacaaaacacagaaaattaacctgctaccatcctctaaagaagcgagggtctcagactttgtccccttttgttcctgcattgccctccattcagatcttgtcacttaggccttggtagcatgagctattaacagccctccatatttactatttttttttttttttttaactctgggagttcctgttgcagaaattggatcacttacctaaaaagctccccacccccacctttggtgactggtgggtttcatcaccaggaaagcacattgttccaactcaaagtctacagtctaaaatcatcatcatgtattttcatcaggatgaaatatcgggcactctgctcagtgcaaggttttattaatgatgtgctgtcaggggctggatgttctgcatatttgcatattaaacagctgagtgaagaaacattgcttttattgctgcagggaataaatcagtttaaagcaagttctcatcatttatactcgtttcagctaagtcttcttttattgaaataaattgttgaagtgctttgctcattctttgaatactgatgaactttaccttgataggacctcaggaaaaataatattttcttaaaggtgcagtattgttccatttttgagtattactttaatacattattgataagttaatttagaagtatcaagtgaaaggggaagaaaaacagttttgaataaaaacggtgtttcctctggactattttgccaaatgcatttttattggtagaacgtaagcaaatttaaaaaagcaacaaaagcagtttttatgaatacctagcgtactttttttttttaatgaaccatgagctgtttttgcattcaaattctcgtaggcattatattgcatctacacataaggacacagtgtttacagaccccaaagcttgctgtcccctgggcaggtgcatgagggggtcccaggcaatcaggctcttctcaaacctgaattatacccggcctcagggtataggggtcaggcagctgtttgacaggattcttgcaaatgtttttggtttctctgtctactcattacgtacactctgccagaggttgaaaactcaatgttgagattacatacatcctgaaaacactgtttaaataaaattttggcctgcatcctgtttttgaaaacttgcaatggcttgccaacgttttcaagttgagaagtttcacaaaaaaaattcggatttccagcttctttcaaaaacacaggtcaaacatcctgagcctgttctgtggtcagttactcattagcagcctctgctctaggaggaatagttatgggtcctttcagacatgcaacccccaaaactccatgttgtttacagtgtgggacacctgactttcaccttttatgatacctgcctggggcatgcatgtggtgactttttccatctctggtctctatcttatctcttgtgatgaactcaggtctataaagcatttgggcactgcctggcacataggatatgtccagaaaacactagctggtattaaaacagaggaaacatgggaactgagggtggtcagtgacatcacattgtatttcctttatggtgtccttctgagtacagaaccaaacatttcttaggcgtacaatttcctgcctccaaattaatgttatttctaaaaagtagcccgttccactcctacaaatctttgcccaaatatgtccttttcagggatgacatccttagccactgtttaaaatagcaaatttctttccaaactctgccgtccctgaatctctaccctgctttatttttctccttagcagacatcatttctctgtttaatctgtctacttgctaattgtctcactgccctccccctccccactggagagtgaatgaaggcttaaggttttgtctgccttggtctctcctgggtcctgagtaccagtggccttacgtggcatttggtagattacatgcttaatgaaaagtgagtgaatgggctgggtgtggtgggtcacacctgtaatcctggctactcaggaggctgagacaggaggatcgcttgagcccaggaggtcaaggctgcagtagggtatgagcgggccactgcacttcagcctgggcaacagagcgagaccttctgtctaaaaatatttatctatattgagtgaataaatgaatgaatggattattttagtttggcctcaatctttatagaaactcaattcaacaaacatttgagcacctgtttgttcagggccacgtgctggttgcaacctggaaggaaaagctgggcaaggcggagatccagtgctcaggaagctgagtccatgccaagatgtgataattgtataaagaactacaataggcataggtacagatctgtaaaatatgaaaacaggaaaacacatggagtcttggagggtagggaagtcttgatgagtaagattgggtctgagataaacctaaaagagggtcaagattttgacggagggctggaagggaggaacgataggaaactgaccttttttcagatctcttcttgtgcgtggcctggggttaagtgctttacatgcatcccctcattgacttctcagagcagctccataaagagtccctgtgcttcccagtttactctggagacgactgaggctcacagaggttaagccacctacccaggctggcaccgcacactttgttcagagtgggcctggcatacggcatcagttcagcctggccctagacccttttcctcccacaaccatattgcccccagtggagagacaggaaagcagggaagggggcaattgccaagcctgtttctagaatctcaaggatgccatttggtgaagctgaggctggtgcagttactctgtggagacaccagcgtcttggacctagggatggattcagggaggattgtgtcccccagtgacctgctttgtgaaaggtagagaatagattacaggtgcccgagatcctagaacccgtttcttaccatgatggcgttgaggtagaggtagaaagatgggtgaggtggctgggtgcagtgggttgcgcctgtaatcccagcactttgggaggccaaggcgggtggatcacctgaggtcaggagttcgagaccagcttggccatcacagtaaaaccctgtctctgctaaaaatacaaaaattagccaggcatggtggtgtgggcctgtaatcccagctacttgtgaggctgaggcaggagagtcacttgatcccggggggcagaggttgcagtgagccaaaattgcaccactgcactccagcctgggtgacagagtgagactccatctcaaaacataagtaaataaataaaaaataaatataatacagacacaggcttttctccccacctcttttaattcttgaaaggaacagtaacaagctcctattcctgtttccttgccaggagaagtattgttttcatataaatcatttgtgacagaagctccttatttttaagtggaaaatgcacatttaataacatgagaataatgtccaaacatcttctcattgatggctgccaagagaacagcagcactcttgctgcctgcagaaagagacactcagagtcaactgttttaggggccatgctgtcattgctgccgcatttgcttaggtgggctctgagcagcagcttcccagacactccgtaaccaatggcagctgagtgcttttgtgccttgcaaatcctctagtcagagcagacctggcttaggaccccagccctaccactaactgactccatgcgctcctatcggttctttattttacctctgcaagcctcagttttctcatctgtaaagtagggataacattagcttcagccctcacaggcttagagtgaagtttaaataagaaaaggtatctaggctgggcgtggcggctcacgcctgtaatcccagcactgagggaggctgaggctggtggatagcttgagcccaggagttcgagaccagcctgagcagcataacgagacccgtctctgcagaaaatacaaaaattagccaggtgtggtggcatgcatctgcagtcctggctactcagaaggctgaggtgggaggattgcgtgagcccaggagttcaagaccagcctgaacgacgtaaaaagacctatctctacaaaaattagctgggcatggtgtcacgtgcctgtagtcctagctactcgggaggctgaggtgggaggatcgcttgagccccgggaggtagaggcatgatcatgccacttcactgcggcctgagctacagggactctgtctcaaaggaaagaaaacaaacaaacaaaaagccatgtagagctgggctatccaatacttgaaggtagccagtggacacgtggggccatttcaagctaaattaaattttaaataaaattaaagattcaatctctcactcacacattacaagtgctaaacatccggacacatctagtggctcccactgtgggtagcacatacagaaagaacgtttccgtgacagtagagtgtcccattgcacagtttgggtatggagcacttagcccagtgttgggcacagtacctgctgtgatggttaaagcttagttttattggccaggcatggtggctcatgcctgtaatcctagcactttgggaggatgaagtgggaggaaagtttgagcctaggagtttgagaccagcctgggtaacatagtgagaccctctgtctacaaaaaactaaaaaaatttaggccatacttagtggctcacgcctgtaatcccagcactttgggaggccgaggtgggcgcattgcctgaggtcgagagttcgagaccaccctggctaacatggtgaaaccccatctgtaataaaaatgcaaaagatagttgagcgtggtggcgcatgcctgtagtcccagctactttggaggctgaggcaggagaatcacttgaacccgagaggcggagattgcattgagccgagatcatgccacagcctgggcaacagagcaagactgtctcataaataaataaataaataagctggacgtggtggcatgtgcctatggtcccagctacttgggaggctgaggtgggaggatggcttgagcccagaggtagaggctgcagtgagctatgatcttgccactatacatcagtctgggtgacagagcgagactctgtctcaaaaaaccaaaacaaaggtcaattttttttccacattcatctataaaacaataaaggaaacatcctagacacttgaatcagagcccttttaattatgacttcaaaaaacagggctcgtgccacccaagatttcctccatatacaaaaaaaaaaaaaggaaaaagggaagaagcaaaggggcaatacagggctctgcccattagaatctctagggacagaccgaggtttgagagttcctgctcctgatctcaggggaatcctgaattacaggtgttaacctgattatccccagcccagctcttcgttaattacctgaagtgaatgggacagtttccaatactcagcacaaaggcgtgcgcagtgactctgtggcgtactatctatttggccttggaaagttactctctaagtcagggcttcttttcttcaactttggtgtgagactccgctggagagctggttagaaaaacacaagtctcgggccccaccccgcagagcccctcattctctagttctgggttggggcccaggagtctgcttttctagcaagcgcccagatgtcactgatgcttacagctctcagaccacagttggagcagtgatttttaaaagtcttttcatttgtaaagagttgttctccatgctccaaatgactgtgacgactgagaaaatgcatgtatgtaaagtctgcagctggtgacattgtagacactcagcaaatggcctttggtgttactgttattttatttttactaattattttttacacctacaaatcaggatctgctacaatcgcttgatatttgaaaattgggcctaacccactatgccactcttctgtcatgaaataacaatcttctatttaaactagtaaacttaatagtttaaaatacttggtagtttaatagtttaagtagagccactgaaagatggctcacacctttcagctcagtttttttgtaccagtgaggatgaatgtttctgcatgtgggtagttggcaccagtcttcaatgaattatttttcctttagccgggtctggtggtggcgtgtacctgtaatcccagctacacagaaggctgaggcaggaggataccacgagcccaggagttggaggctgcaacgacttacgatcatgccatggcactccagcctgggtgatagagcgagaccctgtctctgaagatacaagaaggccacatgtggtggttcacccctgtaatcccagcagtctgtgagactgaggcagaaggattgcttgagaagtttgagattggcctgggaaatatagcaagatcccaaccctattaaaaaattaaaaatgaaaataaaattttaaagaaaggtatttctccccttcacggtaatttggagccagtacttcttgcaccattcatttgtccacagcatgggacaaaggataatgccttaatgcctgctgcaaatagaacagtggtgcttagcagctttagataatgcattgtaggtgttttgcaaaaacatactttcgtgactaaacatcataagctccaagtgagtgatttccccgcgtaaatgaatgattctgtgaggataacacttctaagatgtgagatttcaataaatgaatctgtaggctgctgtgatggatacctttggtggggtaggaaggatcgtcatttagaacctgggttctgactccagatgacttgttttgttctatcccagaaatattcctaaaatcgatttccagtttccaaaagagcaggtaaggaaaacactgagtgttacttggtctttaaaattttttttaaattcatttttatttttaaaaaatagagacaaggaggtgggcgcggtggctcacacttgtaatcttagcactttgggaggctgaggtgggtggattgcctgagctcaggagggcgggtggattgcctgagctcaggagttggagaccagcctgggcaacaaggcgaaaccccatctctactaaaaacattaaaaaaaaatttaggcgtggtggtgtgtgcctgtaatcccagctactctggaggctgaggcactagtatcacttgaaccggggaggtggaggttgcagtgagccgaggttgtgccactgcactccagcctggctgacagagggagactctatctcaaaaaaaaataataaaaataataaaaaaaaaattacatgaaaaatagagacaaagtctcgctttgttgcctaggctggtcttgaactcctgggttcacgtgatcctcctgcctcggcttcccaaagtgctgggattacaggcacgagctgccacgcctcacctcttgttttcaataccattgataagttgtggtcttcagggacttgtgggcattttcaagttaaatatccaacagtcgtgatttagggcatgaagagctcactcatcaagatgtatgtaattcagattttctgagtgtttaattcggcgtctttggtcacaaggaacagagttttacttgtgccacctcttctaagaaaaaggtttactgtaagagataatgttggcaagctgaggaaaggaggcagttttgggtaactgtctcttgcgatcccctcctgcacaactgtggcgttctctttttctgactagctgattctgctgctgctggatttattcattcttctccctcacagttttggctcgcacatgcttcctttttagctcatggccgtgcagttcaactcaacctcatggcatctttttatcagctgtccctgctgcaacaggcttagagttggtttcccaattccctagcgcagaaatccactggcatgagtcatctttcccattggtagattgcagagcaaacttctggacagatttgcccttggctcatgtatgattggacctgcggtctgtccaggtgtactcagagtggggaaggggagcggtggcaggtaatacaaaacccacctaagtagaaggacctatgaaccatgagggttttccttagcagggagtgccagtgggtagggatgactggttttgcagtttagggccaagtgagttggaatgacagctgtggcgtgttgagtcagatcaagtccagaattcctctccaccccacccatttgcagttccctcagatttattacgggacctggatgtgatgcaagcatgcccgctggctcaggctgtgcctcacagctgcaacatccctggggtggagaagccatgtgggacctcacagaacactccaccgtccctgctaatggctgagaaaggactctgccctcatggatggggttgggggacctgttatcttcttccaggttaatcttggtttcagctgctttaaactctactttttagtgggacgcatcatactgaactatggaagcaccatagttgtcacctagttgagcttctctttgttcccatatgtttcagtgaagcagttatagcttcagaaaagagggagccaggaaatacacttgtaattcatcactccttttatagtcagagcataggaacactcatagtatgtatcagaaactagtgaacacatgttgttttacagctctgtctgcaaaattgcatcgtgggcctctttggggagtgttctcaatgtgatttttattctggggtgtcctttggccacaatcctcaggattattttttctctgtgctgttcactgtaacatcgtccaccctctgagatcttgcttttcagtctactggtatctccacttctctctgcagcgtgatgtctagtcagagtttccattctgtttttatgaccctgggaggactgggagagatctgtgaggtcatcttgtccaccctcagccagggcaggagtattccctaatggtagagtcaagtgtttggtttggtcttgtttctaatgactcaagtgatgaggcctggggacgtcccttgggaagctattctgcagcctaataactttcattctgtgatttttttttgtatgtgtctaatattcagagtctgacacaataaggccataaagagctaagtctgtctatggtagatcttcacctgggaatgttctcctaatagtcacttttgttataaatcttcacctagcatgggagttaagtgcattttaaaactagacctggggactatgtatcctaaaatgcaaaaatagcccccaaaatgaaaattaatgttgagaatctagtcaatctgccagcagtacgtacataactgttctgtgtatatttcacatggccatatatgttttgcttgtgtggtgctaaatgcaaaggcagagaagcttctgctattgaatgcttagcacagaactcctgtcctccctctttgaaattattccgacagttgcccctcatttggcttgccaaggagtaagatcttggcttgtgtgtttctcccatgtgtggtgtatctgtaatctcggtcactgttgagagcctggtgggaggctgattattgttgagggaaagatctgagagcagggccaagaaagggaaagagagagagaggaaaaaaaacaaaaaagaaaaagaaaaaagagaggtgggtagggagggaggagagacatggacccacggggaatgggaagagaaatagaaatagggaatttgaaatggaaataaaacaaaagggcaggaaaggaagaaataaagagaatgagataaaaggaaaagaaagtgcaagtagatttgggatctatagattggggaaagacattcatacagtcaggaccagatgttcactggaagttttttccttctggatccttctttggctataggaatctggttctcaaagtgtggctcccaggccagcaacaccagcatcactcagaaatctgttagaaggccaggcgcggtggctcaggcctgtaatcccaggactttgggaggccgaggcgggcggatcacgaggtcaggagatccagaccatcctggctaagtcggtgaaaccccgcctctactaaaaatacaaaaaattagccaggcgtggtggcgggcgcctgtagtcccagctagtcgggaggccgaggcaggagaatggtgtcaacccgggaggtggagtttgcagttagcagagatggtgccactgtactccagcctgggggacagagcgagactccctgtcaaaaaaaaaaaagaaatctgttagaaatgcatattttctgttttcaccccagaaatcctgaataagaaacactaaaggggagtgggcccagctatttgtgtttttggaggaactcctgttttaatttgttttttcggaagtcctccagtttgagaaccaatgataaggacatttttccgggaatccagttgttttaggaaaggcccagtaggcatttatgtttataagcaactccaccctgcactccatatgccttctgtagctatctaacagagacagagttgacttgcagaaactgttttctctggccaggagacaggcttcgttttcgaaactcacccaggaaggcagtgttcttcttttcaaaaggcatttttctgttgactgtgcatgaagccacatagtaataaacagtttccatatccaagcagctaaggcttgtgccttgcaagttaagtggaacatcacgatctatatctcagttttccttatgtttccccagttggcacatcatggccaacaagagagtagggatcattaaggagtttattttcatctttattttatcatttaaaacacatttttttttccaatgagagtactgatgacataaaaggttatacattgaataaccacccaaattagcagtgtttcatatttacactgttcaacacagttctcttgtctctgttcatgatataacagtaaatccaagttgctttaagtagatattggaaatatgaacccaatatgttcttaacatctccatgtcgtaattctaatttaaaatcaaaatctcatcaaattacattttagattaaagcattgtacctatcgaaagaagagaatcgaaaatgcgaaagtccttcattttcagtgtggcctgagattgttgaaggatttgttctattgcatgctgataaatatttatcacggttaagtgaacaatcatttggagacagacaccattttatgatgcagcttctcagggcgtcctaattgtgactctgccttgccattctatgttttatcggaatacgcagacatatactttatgaggttgggtaatgaagagagagagaccccaataaacatattttctaagagtaatggttatctatagctcaggaacccttggttagcacagcctctattacacagtactaggcaagcagttcatagctcaattagatctaacttgcttcatttttaggcattatgttattctaaattaacactgtatttcatattctccaggtctgactattaaccagattttggaacctttagggcttattatttagtaatccctgaagctctcaagtaggcgtttttaaattcatgcattagaacagattaaaaattagctagaaacgcatgttaaatggcccactccctttcttttgctaattgtgctagaaatgaaaaagaaaatgcaagtgaggtcagatctagtgtggtacaaatgaacttgctacttggtttgctgccaattgctgccgaaacaggagttatttaaattagtaaataatttttgaaatcttcttagaatgtcacaggccacaattcaaattcacagaccaggaatggttattatttctatatatcttaaagttttctgcaatagaaatgcatttcaaatataagctagaaaaaaaaaatgtgaggccttattgtgtagataaaagtgacaagatgtccaaatgttttgaaacgcagtgatttatttaagttgtagaaagcttggttttatttcttgttgcatcgtctttatccttagatcttaatcagaaataggaaaattttctgagagaaaattcacgagatcattcatgatgagtcactatatcagttactttaaaaaaaaaaaaaaagatcctgacaaatcctactttttcaggtcctgatgcactaagtctcattcacttctttctatttttcctctctctattgcatattaacccaccatattgagagaatagaaacttttgccttcattatatcacctttacaccccaggacaggtgccctcctcagcggagacaactgtccccctccatcctgcaggagttttgcagccatccttccagccactgcttctctaccggggcaaattttcccccaagggataattgataatgtctgaggcatttttaattgtcacaacttggggaaggggcaagggattgagggagagtgctcctggcatctggtgggtaggggttagtgatagggttcggctgtgtccccacccaaatctcatcttgagttgtagttctcataatccccacgtgtcatgggagggacccagtgggaggtgattgaatcatgtgtgcagttacccccatgatgttttcatggtagggagtgagttctcacaagatttgatggttttatacgatgcttttcctcctttgcttggcacctctccttcctgctgccgtttgaagaaagacatgtttgctttcccttccaccatgattgtaagtttcctgagacctccacagccatgccaaattgtgagtcagttaaatctctttgctgtataaattacccaggcttgcatatgtctttattagtggcatgagaacagactaatacagtcagggatgctgcagaacatctccaaacacacaggactcccaccctctacttccaccccaccaacaaagaatgattcagcccaaaatggcagtagtgaccttgttgagaaatgctgttcaagccatacgtcaccattggaaggttgccaaactgtgctttgcacacacatgctgtctgcacgccttgtatttttctctttgcttagtcctgctcatgctctctaaacaccccagacatcatatctctttaagaaactctggctgagtcccataatgttctggggcaacttctgtcttcccttttccctctggcaaagaatccttgaccaaactttagctcagctcctcagagcccacttctcaactagaccttgaccttgctcctctctccttgctggatcttcatagtccagtctttgtaagagtcattctaagtcagtctagagagaatcccttcacccttcatgtctgatcacccttgcctgccttcagcaaaaatcctgctaacttggttaagttggaatactcctacccttgtggttccttgtagtaatttgcatccactgaccctcccactcccctgctactctgttccttgactataaatctccagctgtctttattatatttggagttgagccctatctctctcccctattgcaacagccttgacccctgttgaaataatcctgcataaagtcttccttaccattttaacaaatgtcaaggtaactttgttttttgttttttttgtgtgtttttttggagacagggtctcactctgttgcccaggctgcagtgcagtgatgcaatcttggctcactgcaacctctgcctcgcaggctcaaatgattctcctacctcagcctcctgagtagctgggattacaggtgcccgcccccatgcccagccaatttttgtatttttagtagagatgcggtttcaccatgttgaccaggctggtctcgatctcctgacctcaggtgatccatccattttgggctcccaaagtgctgggattacaggtgtgagccaccgagcccggccaggataactttttaacaaccccccctccacactgccaactttttgaggaccatgtgttgtgtagggccggatatagtgcacatggtgaacacataaataatgtttgttggccaggcgtggtggctcatgcctgtaaccccagcactctggaaggctgagtcagaacgattgcttgagctgaattgttcaagactgccctgggcagcacagtgagaccccgtatctacaaaaaataaacaaacttagccaggtgcggaggcattcacctgtattcctagctactcaggaagctgagatgggaggattgcttgggccctggacgtcaaggctgcagtgggccatgatcgtgacactgtactgcagcctgggcgacagaatgagaccctgtctgaaaattaaaaaaagaagaagaaatgtttattgaatgaagacatgaaagcatttggtggaaatagggcacacacatgaatatattcacagttgcaaactcagaaggatactcccaacctggttctttgtcttgtccctccatctgggtgctttccagtcacagcctggatgcatgtatgaataaacttctaccattaagtccctgaattatttaagcactgccagtgattctatataaaccgttcagtaaaatgaatggcatatgcgtatgtttcaagagctccagcagcctacccaggatggcttgatgttgtctcttagcaccgtatcaatacctgggggttttcaaatattgcaggtggccgaagcctttgtgttgaggtttctgtagtgtttatccatttgtgaaaccaggcctcaatctatatgtccaacgccattcgtagaccccctttgataatctccactaagcagacatactcgatacatcttcactaatgagttctgacttcataaaatgtattaatgacttctttttgaaagtaagagtgctttgaataccagtcgttattgctttagaagttcataaaagcaaaagcacagtatttcccccagtgtttgtgcgataagagaatagatgtaggtccagcgcctagaattttagctatgcttctcttgtttgtgattccaggtttcagactgcctggtagaaggaggtcacttctgattgtcagtgactttggtgagttcttaccttgtaaaagatttacaattatttcattttcaacatagctttatcttatgacaaaggtgacagaaaggaaatctcctaagttggcctacagggtgctttagaaaacatctggctgggcatggtggttcacacctgtaatctccacactttgggaggctgaagtaggctgaagtgggaggatggttagagcctaggagttcgagaccagtctgggcaacaacgtgagatcctgtctctacaaaaaataaaaaaaattatctgggtatagtggtgtgcacctgaagtcccagctaactgggagtctgaggcaaggaaattgtttgagcctaggaggttgagagtgcagtgagccgtgttgctgccactgtactccagcctgggcaacaggacaagaccgtgtctccaaaaggaaaaaaataataaagcactgtctctctctacccttgcagtatccctgtaggagagagttactattagctcccagtttataggtgagtgatatggtttggatgtgtccccacccaaatctcaacttgaattgtatctgccagaattcccacatgttgtgggagggacccagggggaggtaattgaatcatggggcccagcctttcccatgctattctcataatagtgaataagtctcatgagatctgatgggtgtatcaggagtttccgcttttgcttcttcctcattttctcttgccactgccatgtaagaagtgccttttgcctaccaccatgtttctgaggcctccccagccatgtggaactgtaagtccagttaaacctctttttcttcccagtctcaggtatgtctttatcagcagcgtgaaaacggactaatacagtgaggaaatccatgtgttaggaagggagtgtggttgtacttcaacctggaactgtctaactcctaaggttttattaatatctagtccatttctctcaatctaatagtaaatggaagagaagcaacaacttttgttttccaattccttttgaacatttgaaaggttttctgaaaggacttaaagaaaccatagcttccttaccagttcccaaagcttcagtccttaccaaagtgtacattgcctttaaggagatttgtttccatcaatccctcccatttacaaggaattacagaagagtgatgcccccttcaaagtggctcacacctggctgacatctgttcattaagaatgcctgcctttgggttctaagacgtccaaggagctcttatgggtaacacctgtagatttatagacgttcctctctgactgtaagggccatatgcctgaatctctcacccccatgtttataaaacttaacaattgtggaagcaatgaattgaaggactagggtcaccagtggagtcccataaataggttgtttatgatccctgtgaaacaagaagaccctcttaatttcatgcttcttaaactggggtatgagtggccccaggtttccctgttgggggtactgataccagagttcatttgaagtcattggaaaccaaggcatattttcttaaagagacaactgtttttggtgaataggccatgttgtttatagtaaaaacaaacatgaatattctgtaatagaagatatcgtttgcatggtgttttaaagctaaaacttgagttattaaacacccttctctccctggggatgccttttgctatggggttgcatccacggaagagtttgaaagcccaaccatatggacatcatattattcatttttatttgccatccagagcttgccagcaaccttttagatctctttccttggaaggttcagcaagatgcttgtaaatgtatgttgctttgttgcagacaatgtatatttaaaaagcaattatttgcccatctcttgttcaactcagatattgactgcctttctgtatttctggctgggcattgtttatctccacctcatggtttttactatggttctagaggtctagcctacaaagagaatgcttcccgtccccaccactacccacaggaccctctgcatatctcagaggaatttctcagtgttccagttaattttctctctgtttcctttattacttctaagttccattgcaaaaatatgctgcctgctctgtcagccaccctatatgcctatttagtcccagttttccagcttctatttttttccacataatccctaaccatgataatacaaatataatagaaataattatgtttgtttaaaatatacacagaaccaaatagtcatagagtagtatttcaggtggggggccctcctctagggcagtggagacaatgtcacctgtcgggaacatttggcaatgtctggagacattgttggttgtggtgcggtgacataactattggcatcgagtggatggagggcaggtgtgctactaatcgccctctattgcacagggtggcccttaccacagagaactatgcagctctaaacatgcgcagccccaaggctgagaattgttgatctaggggaagatgtgatttcattcttcatgcttgtaaattattatttaagctgtgaataccctctcttttcccactgaagttgtggttgtaagattctcagagttaagcagactcggcaacattacagaaaaaaaatcaagatgtaaaaaggatttagacgtctggacgtggtggctcatacctgtaatcccagcactttaggaggccgaggcaggtggatcggttgaggtcagagttcaagaccagcctggccaacatggtgaaaccctgtttctactaaaaatataaaaattacctaggcgtggtagtgtgtgcatataatcccagctactctgtaggctgaggcaggaggcagaggttgcggtgagctgagatcgcactacttcattccagcctgggcaacagagagaaactgtgtctcaaaaaataaaataaaataaaatggatttagaaatggtacagtcagaggttaggggtcgggtcaaagcgatccccccagagacctgtggaaagtgtggttctgtctacaagctgcgaccatggtctttactgcttctgcaaatacttgacaaaaagggccacactcttagctggacttttcctccctttcctgaaacaatgcccttcccattgtcaaggcagaagcagcctccactgagaagcgtcagacaccacgtcagtcttgctttccattgctttgctccagtatccatttgaaattcagtgcaaacccataaattccactttgcctctggtagcagcctgcatggtgtgtatattgaacactagaaacacagtaaatccagcccatttattcacattaaccagcaaaggcattctgcatgcccatgtaaatactggaaattactgacatggccttctagaccatgaaaagacagaagcatatggcagaattcatatgtgaacagattgctttttctcataagaacgctttattggaatatcaactattacagctttttgaagttactcttcctgctcttgatttaagtcctgaatcaccccactactctttttttttttccgctgcattctgctatgtatctttacatctgcttcctgcactttctaaatggcctacttaaaccttgaggtaggtccttcagtttcccataaattaataacacatctatgaatatttcccagccagtcttagaagccccagtctattccaataccaggattgtaaacacagggaatagatgaagcaagctgcttctttcaaatgctcttccaatatgaagcaaaatattattgatctagactgcctgctactttcatttaccatgttactactcgtgggattacaggcacaaaggtttcataaatttcaaatgaaatatgaacatttgttgtcaaagtactgttaaggtatgaaaaccctgctagtattagttcccttttgttattattctattattattattattattgtgtttacatccacaggcaatcacatattttaggttgtggggagcaaagcagcttccccccactttttctctcactccaatttgaatcctcccatatgtccctccctcattttttaagcaggaaacaatgaatgagtttttgctcctcttgccctatttgccgtgtctcttttctgtgattcgggagcacattgatacccttcttttggagcagagaagcttgtctttcatgatagaagtaggtcatgggggcggttagctgacttcatcagagagtagcatgcagatcccacctgtgaggctatggtctgccaaggagagttcagcgggctggatcagagagagcagagccatgctggcaagtcggagtctttgtggaaagcagccaaggtcacagctggaaataaaactgtgtattccaaatcagaggggcaatgcaggaatggatcaaaggaatgaaggatcaagttgtcagccaagagaaccaagagccagacacagggaacctgtgacaaaaacgaaaaccaataaaaacatatattgagcattgaccaggtgcccaatattttaatgtcccatgggtgtgcatcaggtacgctgtggaaggacagatgtcattccttaaaggggctgcactgaattagaccaggggttctcaaagtggggtccctggaccggcagcatcaccatcacctggaaacttgttagagatgcagatcttgggccccgccccagacctcctgaatgtgaatctctggtggggagggagacgaagtgggagcctgtaggctgcagtctgtgttaagctttctgggtgattctgatacacggtcaagtttgagatgtagcaggagaagcaggaaacataggagagaagccactaggggtgggaatcagaaatacggtgtccctgcctacctaggggctacattcctccgggcaagtctttttaactctctctgcctggcaacttccttaacaaagagtgatactaatacctgccttcctgtctttgccacatcacgggattttctacagctcatattggttacagtgatagcagctgagatttaggctgcacctgagtaccaggcagggtcctaagtgacttcagactctatagacagtccctgacttataatggtttgacttagattttttcacctttgggatgctgagaaaaccatacacatccagtagaaaccgaactttacattttgagtttcgatttttttttttcacctgggctagtaatacgtggtaggatactctctcacaatgctaggccacagcagcgagctgcagctcccagtgatcacaagggcaaagaatcgatattctaccaggcacggtgttgcctgataaccttgcccagctgtaggctaatgtaagtgttcttttttatattttctttaatttttttaaatttccacctgttttggggggggtacaggtggtatttggttacatgagtaagttctttactggtgattggcgagactttggtgcacccatcactcgagcagtatacactgcatccagtttgtactcctttatgcctcacccttttaccactctttccctctcagtccccaaagtccattgtatcattcttatgcctttacatcctcatagcttagctcccacttataagtgaaaacacacagtgcttggttttccattcctgagttacttcacttagaataatggtctccagtcccatccaggttgctgaaaatgccatcagttcattccttttcatggctgagtagtattccattgtatatttataccgtagtttctttatccacttgttggtagatggccatttgggctaatttcacatttttgcaattgtgaattgttgtgctgtaaacatgcgtgtgcaagtatgtctttcatataaggacttcttttcctctgggaagatacccattagtgggattgctggatcaaatggtagttctacttttagttcttcaagaactctccacactgttttccatagtggttgtactagtttacattcccaccagcagtgtagaagtgttccctgctcaccgcattcacgccaatatctattattttttgcatttttggtaatggccattcttgcaggagtaagatggtatcgcaaatgcaacaaaaacaaataggtgggacttaattaaactaatcagcttttgcccagcaaaaggaacagtcagcagagtaaacagacaacccgcagagtgggagaaaatctatacaaatctatacgtctatacaaggactaatatccaggatctacatggaactcaaattagcaagaaaaaagctaacaatcccatcaaaaagtgggctaaggacatgaatagacagttctcaaaagaagatacacaaatgaccaccatacgtgaaaaaatgctcaacatcactaatgatcagggaaaggctaatttaagtgttctgaacacatttaaggtaggctcggctaagctatcatgttgagtaggttaggtgtgttaaatgcattttcatcttatggtattttcaactcggtatagggtttaatcccatcctaagttgaggagcatctgtatctgttttggtcctgacaataccccatgaaggaggtgcaattacccctggcttagggttgagaaaactaagaggtttagtaatgtgcttgaggccatgctacctgtaagcaagaatcactccaggtttttcttgtttcaaaactcctgttaacaactgagttgctatactgttttagtaggtcaagatatactatgtgtttcaaagggcttataaattataaatgctacttaaaatgatgtaaagtggtattattgttgtcatcatgtatatattttcaactctctcattggcatcttgaggtttctcttctatgaaattctttgccctaggatggtcccctttgtcaaagagagacacattctgaacaaggtcagacaacacagatggagtttggattcgggcactggtgacagtgaagactcagatgaggttcttgagtactttcaattaggtttaccactgaccccatcagtgtgcagacgaagggagatgagagatacagatggttaatgggatttttggggtatcttccagcctttgtgagcacagaggtttcgctacattttgaaaattaaaattcatttcattcgcattacagattttaaatcctagctcctttttaagcttttaattccaacttgcatttcttattattctgtttacaaacctgacaaattttagcagtcgttttgaggagatctagaataatgtttcatctcatttttgaatttaggtacagaccttaaaaatattatgctacatttctaatattaatatcttgctttcttatttaggaacttttcctgacaaacttcccaagaatgtaattttgttatatccatatgataaaccttaagtattcttaagccaggtgcagtggaattcccctgtagtcccatctactaaggagactgaggcaggaggattgcttgaggcctggagatcaaggctgcaatgagctatgactatacctgtgactagccactgcactccagctgggcaacatggtgagaccctgtctctaaaaacaaacaaaccttaagttttcttaatgttctgacacttttataaatgtagtatttcaacttatggtcaccattctgtaatgattatcatttgtacatttaaaatagaaactgttaggccaatgtgttattctagaataggacttgacagacttttttttaaataaaatgccagatagtgtttctagctttgcagttcagatggtgtgtgttacaactgttcagctctaactttgtatgaaagtagccataggcaatacacaaatcaatgcaccatctgtgttccagtaaaactttatttataaaaacaggtcacgggccacatttggcccatcagccatagtttcccaacctctgctttggaaggcctaactcagttaaacattacaagttcatgcagcacggtgtgatggctcacgcctgtgatcctagcacttttggaggcttatgtgggtggatcgcttgagctgaggagtttgagactgggcaacatggtgaagccgtgtttctacaaaaaatacaaaaaaaaaaaaaaattagccaggcgtggtagcttgtgactgtactcccagctacttgggaggctgaagtgggaagatatcctgagcccaggaggcagaggttgcagtgagctgagatcgtgccactgtactcccacatgggtgacagagtgagaccctgtctcaagaaaccgaaaaacgaaagaaaaacaagttcatgagataccacatacgtgaatatatgctaacacagcagcattattttttggttaatcaatgattatcaatgcttctgtgattttaaaaaggagagtcagctattccctcttctgcccgctgatatctacagcctctaccagatggtacctcacttaattgaggtttgccttttttcaggctcttctaatgatcttctggccaactctaaatcacctttaaacttcatggaatttatgcattcttgttaatttatatccatgtaatatcagggtatttctctttgtagctgcatcttctaagataatggtttttcatggagactggcattgtcccgtccctatgagggggacatttgggaatggcatttttagtactcacaaggtaactggggcactcttggtcttggggaggggaggtggctggggacgcagagggtcctgcggtgggtggatacttacaacatagaaatgtcctggctcttgatgctggctacaccctcagtaagagatactgtcctagggtcatttttttcaacccacactagttacgtggactgtcttagtcagtccaggctgctataacagaataccgttgactgggtggcttgatttttttttttttctcccagttctggaggctggaagtcagatgtcagggcaccagcatggttggtttctggtgagtgctcttttctgcatttgtggacagctgccttcttgctgtgtcctcacttagtagacagagagagagagagagagagagagagagagagagagagagagagagagaccatctctcttgtgtgtctttcattcatgagaactccacctttgtgaccttattacttctgagaggccctacctccaaacaccatcttattgggtgttctagtttaacatatgcatttggaagagagaggaacatattcagtccatagcatgaaccaaccacgtgcacagaggtgtgccccaatttactgtcagtgcagccttcacaggcaggaaacccaccaggtccaaggaaggggcactcagctgttacctcctgtcataggaccattcctcactgtgccatcatattatacttccatatcgtgtgtcttgtggcattcctgggcctgcagtgagcctgtggccacctcatagtcttgttggccacagcctctagaaccagggattggaggaacagccatcgctagcatggtgcttggcactgagcgggtgcttagtgaatatttattgaatgatttccaactaatggaagaaagctgaatagcacaacacccagaggattgaggtttattgaaaaccaacccaaagggctatggtgaaaatcatctcaaaaggcagagggcaagaaattgatatttattgagggctctcagtgggtgttgtagggggaaggaagtacaatgtcctggagctaggctgcctaggtttgaatccagggtctgccagatgtagatgtgtgatcttgggcacgtttttcaacctctctgtgcttaatcttctcctctttaaaggtgggctagtgatagttacctcacaaggtagctgtgagaatgaaataatgatacataaagcacttataacaggacctggcatgcagtgagtatcagtgggtatttgctgtggttatttagttatctactttacatgtacatgtaaagaactagggatatctgtattaagacagggtcttgttatgtttcctgggctgatctcaaactcctaagcttaagtgatcctcttgccttggcctcccatagtgctggcgtttcaggcttgagtcactgttcctggcctacttaccttctttttgatcttctgaagtcaccccctccatctgacaggaggttgaaggtccgatggccacataggtggcagtgctggaatttgaacccaggccttcctcccttacctctctctacctctatctcttctatctacctgtctctactccctctccctacttttctctttttcccagcctccccccgatatactcaacatatatctccctctccctccacccacctgcctcccccacactccttctttccctctcctctgcagggagagcttggaaaccaagagtctatgagctcgaagggagcatgcaaaggtgccaggcaggccctcaaagctgggaagctgcagtaggggttctttgggacccagttaagcagtgggcccttgctctgagatgcagtctgctgagctgccatctggggacacatcttgagtttctctccatgatggcgcagctctcagcgtaaagcagtctatggagtgagaagggaaaaggccccagtaataaaaggcaaaggaagcctggtgaagtgactcatacctgtaatcccagaacactgggaggccgagatgggaggatcatttgagcccaggagttggagactagcctgggctacataaaattatatatatatatatatatatatatatatatatatataaaataatgcagaagttttatatatatataaagttttatatttatatctataaagttatatatatatatatatatatatttatttattttcaagacatggtggcatgcaactgcagtgtcagctactccggaggccgaggcaggagagtcacttaagactgggagctcgaggcggcagtgagcagtgatgactccactatactccagcctgggtgacagagtgagactttgtctcaaaaataaaatataaaataaaataaaaaggaagaaatagccagtagtgctttcttgtagacagagaagctggtgaaatgatgtaaccaggctgggcatggtagctcacgcctgtaattcccagtactttgtgaggctgaggtgggcagatcccatgaggtcaggagtttgagaccagcctggccaacatgataaaaccccatctctactaaaaatacaaaaattagccaggcacagtggctcatgtctgtaatcccaaatgcttgctcgggaggctgaggcaggagaatcacttgaatctgggaggtggaggttgtagtgagctgagattgcaccactgtacttcagcctgggcaacagagcaagactctgtctcaaaaaaaagaacaaaaaaaaaaaaagaaatgatgtaactggtagggagaaagccaaaggttagaaagagaacatgaattgagaatggaaagatcgcagaggaagcagatttgtctgcacacctcttgcatgtgtatttggagaagctctgtgtgctgcgggtcgagggaaacacataactggaacaactgtccttttccaccattgttaaatcctgctttgctcactgcaggagagggggattatataggagcttctggaaacagatgccttgggagctctcctccttttccagaactcccacacttgctcttgtagatcatcataggataactctccgctccctttcctaagaaaattgatctaaaaagtaattatggaatcttgcagtgcttgttgggatcagagaaggctcctccgatgatgggatgttaggtagagggctgcagggaccttgcttttagtcaggaggcaaatcaagagccaagagagggaggggtggtcgtgagtttttatgatgttccttctcttctccgctccttcctgacaagagtctgtctcttttctctgtgtgtcataactacccacattcaccccggcagcccatctaccttgtttctctcataagtcagcttctctcccatctttcctgtgaaaatttctaacaaaatgggagttaaggccgggcatggtggctcctacttgtcattccagcattttgggaggctgaggtgggaggattgcatgagctcaggagttcaagaccagtgtgggtaacatagagactctgtctctacacatttttttttttaattagctggggatggtggcttgcacctgtagctccagctactcagagggaggctgaagcaggaggatcccttgagtccaggagtttgaggctgtagtgagccctggtctcaccactacacttcatcctgggcaacagagtgagatgctgttttgtttttgtttttttttgtttgtttgtttggttttttttggaaaaagaaagaatcaccataaaaaagatgggtaactcggaaatttcaaatgcttgaatttcttgggttgggaagaatatcccaaaatgtgtttccaactacctcactgattttgacttcacagggagaatattttgatttttatgctctgagttgctggtactgctgtgggcacagaactgggtatgacagaacatttttctgaactatgactctgatcttctcaatctctcagtgggaaagagttttggaacttattatttttaaaaacttggtaaaagatttataccataatatttatcattttaaccatttctcagtgcacaattcagtggcataaaagggcattcctgttgtgcaaccatcacccctatccatctccaagtgaacttgattcttaaatctcccagccatctgtttcaattcactagatgttgttccacccagcacgtcatggtggaaaggggcaggctgtgattttttttttttttaacctccagcagctgtgttccctgtggcaactatgtaacctctctgagcctcaacatctgtctataaaatggaaacagtgcaacctaccttagcatttgatgatctcaacttggatcccatagcgggtatctccaaaatttcctcatcttgactacgttctggtgaaacttaagatgtcagcacatgacctacctcccttcccttctcattcatctgcattttcacaatgcttggttttatcttttatacatataatgcacaatacatgtagtgccaacaagaattatagtttctgtaagtagtgtatgattgcccacggatcttcagtaactcattaggcactgacgggctgacatgagcaacaacgagacttagtatctgttgcagctctccatacagtttacgaaactctaatccataaaagccgtttgaaatttccattaggagatttgcacaagtggttaaaattagtcatgcattcttggtctaaactgcaggaagggtatctttactgtgaaaatgattatgacatgttaaaactgtgtaatagtaagcagacagttttccgagctgctgggtgaattctggaaatgctctattattttctccctgttgactcctttctttcaggcaagacagccagcatgttgacttggaaaacaactgaggctgagcagtttcagagcattgacattacgtggcttcttttgtgggccaccccaactcttttattttttttaattgctgcttcttcctctaaaatacaacttgttttttttttttttaaagaggaggaagccttaaaaaccagcgacagtcttggttttcttaacctgtccgccatttaacatttctagaagtgcaacattgcttctaaggtaagggcaaggaccatgacttttgcatgctgaaaatgagctgcctggtttattgagttagttattcctttttagtgccgcagtgttttcagtgttagagaaaaggctgtgattttctttgatattaaaaagccaaccacttatattttccaaagccatttgcattcagtctgacggccgctaaaaatgtatgtggatttttcatctgagaggttttctctatgcatattgtttacatttatcaaatgttgtcctgcccagtactttatattcattgttgcttccggacctagctgacaacatggtctatatgaaaaacaacacaaaacaacacataagagagtcaaagggacttctttggggagaatataaaaacaagccaaggcgaaagtggctgtaaaaatgcgttgtgttcccaagtggaggctccttctttgttctgtcatcagtttgtcagttgtcaatcaaacctcccttcgcctcacacgtttgctaatgtaagaagtgctggctctgctcttagcctgcagtggtgcagcttaaaaattctgggagggtttcatgcagtaaatacttaaagtaacagaaaaggactggggaaaagctgatgttgtagctgtatgatcacccatgtaaaactgtttatttagttatttatttatttatttgcttttttacttccttttctatgcctttggtgactttgtgtaatgctgtatgtaccatcagagcacatactgcttttgtgcacacatacattgaaaacaaaatgaaaaaacaagaataaaacaaaaaccctattcctattcctacaattctggtactttgccacaaggtggtggtagtgtatcttgagtaaggaatatgacctgctagatataagcatctgtttatttacacactaaggaatgtttgagtgtggaacgtggtttagatgctgtgcgtacagcagtgactcagataggtgtgtattctcaagaagctttcattctaatgacacatactttgtctccagtcagagttatggcaggtttttttttttttttttttttgactaaattcacccatatttgatggcaagtgtgatcacagcatgtttataaaaatcattcttaattaaggcatttccatcttatcaagccccctatttaataaggatatcaaaaaagaaaacagttttcgtgcatatgtgtagctttttagattcactttttccttatttgacccatataaactttgtctgtctgtgtctgtcagtctcacacacatccttcaacacatctcttatttctttccagagccaggctaaagcacccttgccatcttctctctctgctgttaaattagatgccttctccaggaatctctctgggggcatcctgagccttcccgattccatttcagatttctttctgtaatcaagagctccatctctgttgctttcctggggctcttcctctcctctttttgaagcttttcatttccctttatattctttcattcgtcaactacaaagaagctgcaggcaggaacaagagagctcagcacacttggtgcagtctctctggcttggtaattggtcccaagaaaatagtttttttccaattatggcaacattgaaaacttatccaggagaggaaaggctctttcagctgctctttctcgatccttgcagtttcccttttgacctgtgggtacacatggtactgacgcaattggcacctcagatggttcttcctgacagctacccttgcaactgactcaggatacaaactacctttttttttggagacagatctcactttatcacccagtctggagtgtaattgacgcaatcctggctggctgcagccttgaccttctgggcccaagcagtgttcccgcctcggcctcccaaagtattaggattacaggcatcagccgtcatgcctggcacaaactgcctttggaagtgaatcagtcagttgcctagtaggcctaaggagaccatgatccatgtaaaccatggaatattttaagcagaaaagaacgtattccccttcaaggacaaagtgctggaataattgacatccaggttatcacagagccttcctatagtgttgattctgatcactcaaataatcttagtgttaaagggtttatttttatttttctaccttcttttaccaccccttactcccatcagagcaccatcagtcttttgggaataaaataattcctcagatatattaaaaagctatagaagcagaagttaacgtacatgcaaaaatctctacatttctcaacaattgtgtaaccactaaatatagggaaagaagtgtgcaaggtataagacattggccatgcgtccttgtctgtgccacctcaccaggagcattgctcctttttatgcacaagcatcagaggttctggacatcttcttgggctagttggtatagcttccttctcagctcattctgcaaggtttgctttggaaaagtctgtgcatctgagctctctcttgccatatcaggaaccgaagtcagaaataaaggctacagatgctcaaaatctgcagtattcaatctttttaaggcccagcatggtgtctcatgcctgtaatcccagggctttgggagactaaggcgggtggatcacttgaggtcaggcattcaggactagcctggccaacatggtgaaaccccatctctactaaaaatacaaaaattagcctggtgtggtggtgcacacctgtagtcccagctagttgggaggctgaggcaggagaactgcactctagcctgtgctagagagcgagactctgtctcaaaaatataaataaataaataaataaataaataaataaataaataaataaataaagtatctgtccccaagtcacaatgctattcggttggtgcaaaagcaatcgtggtttttgccattacttttaatggaatagtaaataacacttgatctttggtcttctgacctgaaatcccatggctaggattgtcagatagaatacaggacacctggcctgttacagtggctcacacttataatcccagcaccttgggaggcagaggcaggaatatcacctgagcccaggaatttgaggctgcagtgagctatgactgcaccattgcattccagccagagtggtagagcaagaccctgtgtcttaaaacaacaaaaacaaaaacaggacacctggttaaatgtgaatttcaggtaaataacatattttttaaaaatgtatcccatgcagtatttggagcatatactctaaaaattttctttgggatatacttctaagaaatgatttgttgtttatgtgaaactcaaattttactcggcatcctgtgtttttatttgctagacgtagcacctacctgtgacatctttttgtttctgccctgctgtgtcacagggtcttggtatctttcctcctgtgattctgacactaccttgggaaatgactctgtatcaagcgtttaccatctgctgaaagctttgcatactctgttgcttatcatgacaactgccctgaaagttgggtgtacttgttacccctttccagattaaaaaacctaggggtcagagaggttaagtaacttgctcaagacctcacagtgaactgtggtggaccactgggattagaacccagtgagttcagtggctttgcctccaagtgcgtttattattgtccgcactccaaaatggctttaaaaaattaaaaagatacatgacgttgaaatcagtgacagaggcataaggctccttgagggaagaaaccaggtgttggccataaaaaaattatttttcacagcgcccagcaaagggcttgtatgcaaaggaccctcagtataagctggttgttgactgatgtgtttcaagagtaagtcagaaaaataaaaagaaggcagggaaagagttcaaaactcagtgtcacttgcacatccattttgccctagaagtgttttaaattttatcaggctcataaactatgtttcgaaacgtgaaaataaattggccccctgaccccttatgaagtgacatcattcatctgaaaggtttatcgccctgcgtgtcattttgaagttccctactctcctcctcgttctctaaatccatgaaaaaatagaaatgggaggaagaactggagagaggggttctgtgtgtgtggaatgtggctctggaaagcccccagccctcctgttaacacaatgcttttatcccgtaatctctgcctgcgggagacaaaataacagttcatctggaaaacaagattaactcatttaacttacgtagtgatcacagagagaagcttgttggagttgtctggctgaaggaaagcccgcgattctcggccattccggttcacagggcctgggtagcgggcccagcctgttgcaagtaatcgggctctgtcagatcagccttggtgagattgggatattaccagggtattctgttcatctctgacacaggccctctcaatctgatagacggtgtgcctcttctcttcattagaacatcttcctgaacacttgcctgtctgcactgccctgctaaggggttttcaggtgagcgtgctgtgggtaccttcacatttcaggccttttaacagggaatgaaaaccaactgccctgtgattccaagtctgctgatgcatgtgaaattggctttgtgttggggcctcttcttccaaagcaacagtaagcattttttttttttttgtgataatctctctctgtcacccacgctggagtgcagtggtgtgatctcagctcactgcaacctccgtcttctgggttcaagtgattctcctgcctgagcctcccgagtaactgggattacaggcacccgccacccgacgcccagctaatttttgtatttttggtagagatggggtttcaccatgttgcccaggatggtcttgaacccctgatctcaggtgttccaccctccttgtcctcccaaagtgttgggattacaggcgtcagccaccgcccccggccgatagttgcctttcttaccagcctgggccaggagcagttgtttattttctgctatttcgtgtgtttctttttgctggcagtgacatactcctacagggatgtctgcctcatgttgacctgcttgtgtttaccacctagaggcctaagaacaggctttccccgttcaaatcacccagtggcgtgcacacttggggcacctggggactggtttcctgaatggcattgagagtcattactttccacacacagttaactgcagggagatttgtctctgaaagtagtcttcaagaaatgcggcagctgcttctagccgctccatccttccttttcccagtgcgcactaaccctccagagccttccgcatctgctatgcagcattggccacaccagtgggatgcaagaatttatcccttctgttgatgcaattaaagctaatggatctcatatatatatatatatatatatatatttatataaatatattttatatttaaaaatatttatattttatatatttttatatatttatgcaagtatatatctaaatatataaaatatatataaatatatacatatatgtgtatatatagattttgttttttgagacagggtcttgctctgtcactcaggctggagtgcagtggcgtgatcatggctcactgtagcctcaacctcctgggctcaactgattctctcatcttagcctcctgagtggctgggaccgcaggttcatgctaccgtgcccagctaattgtttaattttttgtagagataggatctctccctttgtggcccaggctgatctcaaactcctgagctcaagcgatcctactcactcggcctcccaaagtgctgggattacaggtgtgagccaccatgccaaagcctaagggaccttagaattttttctcctttcttttcacattttgttttgtgcttgcttatttattgaaatctggaccacaaataacttacatgtttgtcaaggccagatttcaggacctaaccaacacccgacaggcatcttagaaagtggagggtgtaagttataaagagagattacttccaacacgtttctttaaagcctgctggctaaattaggtgggaccttctttgtgtcctctctgttcttgctagtctggcctttgtataatagggaagcagatatatctggaagcctctaagtgtgcatcatggaaattgtttgaaatgttcaaagtgatgtggatgtatatatacgttaaaaaatatcactttcccttttgaagacatttactatttctatggtttgtttagcaacagcctggctgaatagttcttcaaaaaataggaacatgatgctcatatctggccactgtatatgctttggagggaacttgaagactaggtggctgcagccactcagaatcttgttgaatatttaacatttttttgtgaatgtatcaactaagaagactatcaattttagagcatacagctgttctagaataatagtttgaaaggccagccgcaaagattgtggtgattaaagtgtgagcagatgacggaatgataaaccttaacgcttaaaaatgtgtttttatagtgccattcctatataacatcgtctgataaatgtatttgagacgaacaggccaaatgaaagaaccttccataaggggacgcagcacagtttgaatataagtgttccctccaattcccatgttagtgctttactatgagtattgaccagtgttaaagagtgagcgcacaggagccttctcaaagcctcctgcacacactctcccactgtaaatgcacgagtattgatcacaattattccgtaaacacatcttacaaattccctcagtgcacgcgccatctaaattaatccaaattcagaacaaagctctcttggaaaaggaaagagcatctctttcaggagcttccctcttggacattaaatcttccataatctgtgctagttcggcaaagaagccccaacgtcctcccaatcatagggcgcctgagctcttggtctcctatatcttatattcattatagatgtcttatatccattcctgtatcctttgtgatgtcttgagtgagaaaatgctctgaccaataagccaatgttcaattgacttcgaaatgttatgtgggataggctcattcagggtggtacggctgtagacaaaatgctatatgcattggctgggcgcggtggctcacacctgtaatcccagcactttgggaggccgaggtgggcagatcatgaggtcaagagatcgaaaccatcctggccaacctggtgaaactctgtctctactaaaaatacaaaaattagctgggcatagtgttgtgtgcctgtaggcctagttacttgggaggctgaggcgggagaatcgcttgaacccaggaggcggaggttgcagtcagccgagattataccactgcactccagcctggtgacagagtgagactccatcttaaaaaaaaaaaaaagtcttatattgattaaaagagacttaagacacatagtaccagatggattgtgtgatgctcattttgatttggatttaggggaacctgctctcaaagacatttttctgagacaaataggaaaatttgaatatggagtagctaatagatagtattaagagagtagccttcattttttaaagtataataatattttaattgagtttatgttagagatgcataccgaaaaatctacaagtgaaatgatatgataactaagacttgctttaaaataatgcggaaaaaactgttagagtaatagcgtaaataattcaagattggaaaatgttcatgttaaattattgttggccgactgtgggttcatttaattaggttctctgttttggggtatgttgaaaatttttcataagaaaatattattcagaggtctcaagaggcaggctgccaagaatagcagttagaaatagctagtatcaggcctggtgtagtggctcatgcctgtaatcccagtgctttgacaggctgagggaggagaactgcttgagcccaggagatcgagaccagccagggtaacatagggagaccctcatctctacaccgaatttaaaaacttagctgggcatggtggtgcctacctgtggtcccagctgcttgggaggttgaggcaggaggattgcctgagcctggtagaggtggaggctgcagtgagctgtgattgtgccactgcactttagcctgggtgacaaagtgagactctgtctcaaaaaaaaaaaaaaaaaaaaaaaaaaaagctagtagcacaccccaaaacttctagacagggcatggtgtgagctggagtagacaactagttcatggtaacaggaccagcagagctccgtcttgatgctgttattatttggtatctgttaggagctgaattatgtgtccccaaaattcatgtgatgaagccctaattcacagtacctcataatgttactctatttggagatacagccttttaaaggatggttaagttaaaatgaggttgcttggatggtccctaattcagtttaatttgggtccttataaaaagaggaaatttggatgcacagagacaccaggaattcatatgcatggaggaaagaccacagtggcaaaagacacattgaggaggtggctgtctgcaagccaaggcaaggggcctccggagaagccaaacctgctgacaccttgaccttgaatgtgcagccttcagaactgtgagaaaatcaatttctgttgtttaagccacctagtctgtcacattttcttatggcaacccctgtagataatacagtcccattctctggggaaacagatacctccgccagggtcctgatctgaatatgatttggggtgatggaacagaaacacccgaggactgtcgttggggaacaggaaacctgtctgtagtcctggctctgtctccaattggctacgagggcttgtgtgtactctagttctctttccgtgacactgcatttggggggaaggtaagggaactggggaaaagaaggcaaaatgatgacttaaagagactgatgaacccaaagctctcttgtgaagccccttctagaataagtccgtctcacgttacagtgcttaggaagtgttagatgtactgtcatttcttcaacatatatgtcctatattagtctattctcacactgctagtgaagacatacctgagatggggtaatttgtaaaagaaagaagtttaacggactcatagttgcacatggctggggaggccacacgatcatggcggaaggcaaaggaggagcaaaggggcgtcttacatggtggcaggcaagagagcctttgcaagggaactgccctttataaaaccatcagatctcgtgagacttattcactgtcacgagaacagcatgggaaagacctgcccccatgattcagttacctcccaccgagtccctcccatgatacgtggggatgatgggagatacaattcaagatgagattttggtggggacacagacacaccatatcatgtcttggcagccatctatattcaagacactattctaggtatgacataaaggatggcaaaaagtcagttacttaaaagtgtggaagcagagtgtcccaggcggaggaaacggtaaatgagacctctggtagtaagaagcagtgtagcatgtttgagacactgaagtccaatggaacttgggcggaataaatgaagggaagattcaaggtgaaggctgagaggtgtgcatgggtctgatcacacagagccttgtaaaccaaggtgaggacttaagattttattctagctgcagtgaggaaccagtgagtggttttaagccagagagagattgataagacatggaatgatatggtgtgatatatgaaatgacatgtttgaaatgatagatgacgtgattgtgatataatatcatgcggctgaggacaacactataactgctcggtagagaatggattgtcatggcctgggtgtggtggctcataatcccagcactttgagagctccaggtgggatgattgcttgagcccaggaatttgagaccaacctgggccacatagtgagaccccatctctattaagaaaaaagagaatggattgtgatgaattaggattggaaacacagagatcagttagaagatttatcagtgagaaaagagttcagttgcaagttaaagaaaacacaagtaaagctaactgtaacacacagagctttgtcttttcttgctgaataagaagctgagagggaggcaattgctgtcactggtccagccggctcagcaactgcacatttgtcaaagttcttcatccccagctttgtgattctctaggttattcattcttctgggatcgtagatggccaccacaggttcactgtggaaagaggggtaggaatttttaccagctgggtctgactccaccccacccccacccctacccaccgttttttgtttttgttttttaagatgaagcctcactctgttgtccaggctggagtgcagtggtgtgatcttgactcattgcaacctccgcctcttgggttcaagcgattctcctgcctcagccgagtagctgggattacaggcacatgccaccacacccagctttttgtatttttaatagagacaggatttcactatgttggccaggctggtctcgaactcctgacttcaggtggtctatccaccttggcctccccaaattctgggattacaggcatgagccaccgtgcccagccgtgtctgaccattttatcaggaaaagcaaaagcttttctagaatctatcaactcccttctgcatgtgtctatttggcatgggctgtgtcacatgacccctgagctgcaaggaatgctgggatacgatggaagcctgccagaggtagagccttgggaagggctgatagggcctctaacctaaatgtccaccaccagaggtattacagaggtttgagcaagaaattatggtggtcccagggatgatgcattctgataatcattatcatcaagaggaatgtctaaaggaaaggggaaaaaaaaaatcagacagtcacattgaaatgaggtccttaagataggccctaatccaatatgcacataaaggggaattttgggcacagagacagaggcagagatagagggaagatgatgtgaagaaaaacatagggccgtgtagaggcagaggcagagattgaaattgtgctatcatgaacgggggaatgtctgggactgccagaagctcctgaaggcaggaagcatcctcccctccagcctttggagggaatgtggccctgttgacaccttgatttcagacttctgggttccgcaactgcaaaagagtacattgctgttctaagccacccagtgtgcagtagctttctgcagcaaccctagggatgaatgctcctgccaaatgctgcctgcccttcaagatgagtgttatttggcagaggaagatgatgcactgcttattttaggggatgccctcacttttgggtccctatgtcacctgtgtgtactccatgccagtgtcttcccagcccctgccaggcaagttcgtgtggttctgtgataaccctcatctctataggttctgtgataacgctcctctcactgtgctgctccttgggtgacatcacacccaaggagaatcatgggaccacctccagagagattttcttagaggtgtggaacagaaaaaaaagcgtctctattcgaattgcaggatcttccttatagtcctggagaaacgtggcccagcattgtcttggtccatagcctgagcttaccctccctacgcaaccacagctgtgtgcagcttcagccaggtttgctttacctgatctcactggcttcatgtttattatcttattttcagtttcaaaagggcatatcctgccccctttcccaagatcagaggataaggaatgtcttgatgttctcagtcgtaaaattaggctaataacacctcccatggttgtctgtgaggacaacagaaagtaatgttttctctgaaaagtttaaaagggtaaatggcttcatcacatggtgatgacagtgattattccaagagatggctgtaagctccctgagaacagaggtgctctgtgtaaatctagtctgtctccccaggcttagtggttgacctagactataccaagagtaagtgtgttttttaaatttaatttaaatcaattcattaagcattgctaaattggaaaaccatggaatatagagatccagtagttaagagcctactgggagagacagcataataattacaataagtgcagaacttgcaataatgtaattgaaataatgtaatacaatcctgcttaatattacactgtatatattcattgacttatagactgagctccttatcttgttcattgctatggctttagcaccttttgaacagtggtgcttggcttttggtaggtggtcaacaaatgtgtattaagtatatgaactgttggaagggtctgctgtgaaggatgtgatttgctctctttgatggtggacaaagaaggtttcctggtggaagagattaatgagttgggttttgatgaatgaataggagtttccccagacacacggaggagacagaatggaatgaaagaggggttttccaagaagaggcactgaagggcaagacttcattgcttctttgatactccaatgccggcttcctttgggttggactctgatggatctaatcgaggattaggatggaggtaggtgggaacatatttagaaggatgccctgtggtttttctccttcctgctatttatatttccctctctgtctttcccacctgtttggtgatgaggaaggagctgtgtactggtttgaaacctattcacgacatagtggacccaacaccaagtgtcttattgtaaatggatccacttttactacagttactttaatggcatctaaatgataaatgttaataagcatttttgcttgggaaagcacaatggtattagcctgccagactgcaaacgttatttgctttatggaaggggatttcaaacaaggggttctggtggttgtatttttgcctcaacggttatttatagagaaagtatgggccattgcatgtttatagtatctcttttttatggctgcccaagttattattttttattggtttgggtacttaatttgcacatttgtaaacaattatgtagttacacagctgttgtaccacagagaccatatgcatttccatgttaagagaaaagtccgtgagggattctcactggataccatcataaaagaattattgtggtgccaaaaaaatttaaaaaaacgactagctcagaagttatcattgtgtttttatagtatttggagttaaataaatttaatgtttttttgctcacttgagttggagccaaactttataactgaataggagggttctctttcccatatttgagtagaacacatgatgttcaataaaaatgaatttgccagtcagaaaaatttatcttttagaaaattaatacactgagccaagcatgggtggtccatgcctctaatcctaggtactctggagggtgacggtgggaggatcccttgagcccaggattttgaggctaccctgagctatgatcacaccacagcactccagcctggccaacatagtgagacactacctagatagcttaggagagttccaatgtttctgaaggatgtttttttaaaagaagtattcatttaggtgacacatatttattgagacactaatatatgccaggaattattctattggttcctttggaggagacatgaataaaggcatggatgtgactgaggaggtaaaggtgaagaattggggaggggtggatggggctgactcatgacctaaagaacatggcatctggggctctcttgaaataatctgcactaaccactcattcacatttttttgagtctgtaagatcccaggcactcttggtagcaggggggttaggtgggtgaagggacaagtagaacttagttccaacagagctaaagggtattggtgaagactatgagcccctcatgacgcacaactggtttcaaatccaagcccatcatgtatcatctgtgtgattgtgggtgatctctttcttcccaaagcctgttttcttgcctgaacctgatcaacagaaacagtcagtgcaggtaatgtgtttagcacacagcctggcatacgaacttccacacaaaacgggtgaccatggctgaagggttattctggggagccttccctgtggaagccccattaaccatccctgctcattcctcccgtgagaccaccatttgctaaatcttctgtcaggtgatgtgggatccaagaagaaacaataatcagaagcttgccttacaggcatgcacaatttcgggtggactgtcacatgtgcactgaaaaagtcgagaaatgttatgatggccctggaaggaggagtgtctagatgaaatgcgaataaataggagacaagtgtgtcgttaattaagaaggagaagggggactttaaggttaccttaaaagaaaagagacccctcaatgctttggaagagcctttttaataagctagtcaggtaagttagattgctctgtcttacactggtttagtaattttcatatatacttatttcctctgaaatgtattagtaacatttgtaatttaccaaatggaaaatatcacttaactttaagcttcatcaagttaagaatgaatttgtaaccaggggtattatgttttctcttattataacaaacaccaatcaaaaacaaacaaatacatgacgggaaagaaagaaaacccagcatttattggcagtatttttctgcaaaatattatttgtttccctttgcagttttattcattttaagcacgttttcaccaaagtgttctattctaagctagtctcaattcaatttaaagtggaaggtttttttcagtttagataatttacatataaaagcgttactgtacattttatgaaatgactgttttcagaaaacaacgatttcaatttaatcgtattgttattctgcaagttgaaatgcctcactcttgcttcttggtcttactgacaatattccttcttgccctaattttaaatggtgagtgtttgaaaattgatgtgcttcttttagaccctaccagtaagacttaaggcccactgtgattcgtctgatagacttgaagattatgtgcgcgtgtgtgaaacaagggaatcttaatcatctgaacctgacggttatatagatctttctgaattatttttctttcttttcacaagaaagaattatttttctttcttttcacaagaaattttgcttgccaatggtcagatctgttaacacgaaaactaaaaacttatacatcattttatattttgaaattcccaatttgcaatgttatttttttttcttcttttttttttatgacacttttcttctggaaaaaatccttaggacccagttactctctttcaggattttatatcataatgtgtctgtgagagacagagccagatgttcaggatttcagaccaccatatttgtcctaggaaacctgccagcatttcacattcttgacccttgaattgaatatgaggctctgactatataacagaaaacacccgagttttatgattctgcaagcgtggtttacactataaatttccaccggtctctgcttgtctcttctagaatttagggttattctcaaactctattatacaagcagtgcccaagtgccttcctccaaaagtacattagatactttcttggggagagaagaaattagacaggagctacaaagatggattaaaattaatttggtcctaactaaaagataagttcctcccccatcctcaggatgaaaccaagagcacttctccatcatcaggggagccaagtggacgctaatcaccaccgtgcctggagagttgcctttcagctggtgaatttactattgccaactcctgcattcttattagtctataagattgaggtcgtttattggtgatcacttgtagatatatatttatataaatctcttagcccagaatctccataaactgtttttcatgatgtggataccacgtgggatatgtcccacaattggcaagtgccataaatatattataggccattatactttctacagtatctttaattgatatgccccatgtctaagaaaaaaagtagctttcatgatgaaggtgatgaactacttctttccattattctatttcccccttttcttcttcaggctttaaagatatcataataccatttacatttactgtttaatttttaggtctgtatttaaaaatctgtgtagtgacaacaattattcttattgtatgaacatattgtcggctggagagtattcagctgtcagacaaagtgttctctaaagtgttcagccatcagacagaaactctattgctggtggcggggttgtgggctgggggaaccagagtatttgctcttctttagaagtcatcaatggtaagcctagggcagcctgaaccacttgtgttagaaatattttttataaagcaggacatgtgctttgaaatttgattcctccgtcactggctgtgtgaccttaaagaaataaattgacctgcctgagcctctcggaaatattggctggccagtagcatcctcacagagtttttctgggaatcgaatgagagattacatacacagggccaggtacatagcaggtgctccgaagatacccccgacttcctttcctacgaataaagaggcccaactttttgtccatatgaagaggttggcagagcaaacgcacacgtgcgtaggagctggaattgtcgataatgtcacaatctcaggaaacccaactttgtaaatgtgactttcctttgctactttttgcctattaagcagccatgtatgtaaagtattaaattagcatccaggcactttctttttttctagaaggtggtattttgcatattaatacttgcttaaatcaagaagctaagactttgtattatattttgctttacgtgccttgattaaggtcatgatcctgacattccagtcccaaaggagaccaaggaaatgaccagcacgtggctcactccctgtctgtccagtagaggacaccaaggcacgatgaccgcagctcctgtagtagttatggtcactgactccgggttcagacggacttggggttcagtcctagctctggcgcttaccagttttctcaagtgactttgagcatctttactcaaggctcttggtctcagttttctcatctgtaaaatggagatcgcagtatctaactcatgggtgtgtttaaggattcagtgatggagaaaatagctgaaaagtgaccgtatgaaatgagcagcagttgtcaagtacttggcatagttcctgtcacataggaagcatccagtaagtagtggtatctgttgtgattatgatcatattttatttcatggagttcagtaagagtacaaagcgaggagtttttctgcccctccagtagctgtagaatttgtgtgatgactatgtgagcttatcccctggtaggtataatggaaagactaacaagagtagaagagggatgtaactggagcatgatttaaaggaactgtagtttgtctctgtttttttttttttttttttttttcctctaaataaacaaaggaatagaagatcctgtgaagagctgggtgtggtggctcatggctgtaatctcagcactttaggaggccaaggcaggaggattgcttgagcccagtagttcaagatcagtctgggcaacataatgaaaacctaatgtctacaaaaagtataaaaattagccaggcgcagtggctcacgcctgtagccccacctacttgggaggctgaggcaggaagattgcttgagcccaggagttagaggctgcagtgagccatgatcacactggagcactccagcctgggtgacagagcaagattttgtctcaaaaaagaaaatgatgtgaggaagccaggaatgatgagtacctggattaaactaccttaaggctgattgagtaaaagtgaaagatcatcccgtcaactgctggcctgccgcttgtgttcgttaatagaacatttccctctgattgtcaggctttcttagcagctacagaatacttattttcttctttatattataagtttatgccactgcaacattttagaatcacctgggaagcttttgaaaactcccagcatcatgaagcatggtctcttgccttggggtcagtgtctgtcaacgtggcttttgctaaagagccttcccctatgagaagtgaggcaggagaaggcggagtgaccacaagatgccctgatggtgccaagctattattataaatgaactgaagccacaacagaagtctgctaccttgttcttatctgcatgtttctctctttccagcctcatcttctactaccttcttctactcccacacttcttctaccttgattcccagccttcttttcttttcttttcttttcttttcttttcttttcttttcttttcttttcttttcttttcttttcttttcttttttcttttcttttcttttctacctctcgggattctgagagcatcctgtaatgttggaaagctttctgctaatccgggcattggagtgctctctgggttcactcctgacagttctttattgctttcccacctctgccaaggtcaaaaatggaacttgcttcttgttctcgtatcactcagactaagcagttgatgtaacagataacccccaaatttcagtgatttcacatttaatctgtaaaaaatgaggatttgtttatagccccaaagacagtctagtttggattatttgaggacctagacttcacctgcacagtggtttcaccatccatccccccatggcctccatggtaccctctgattcaggctcagcaggagcgggagaggatgcataggactacatgttttctgggccaggactggaagcagcatatctcagatccaacctctttaccttggcaaaaattcaggatgtgcaggacgaggaggaaaatgggagtagtgactatttagccagtctttgccacatcccggttcatatctcactccgtcatttataacctgtaattaaatctttagtgagtacctgtcacaggttgagcagtcttctagggcctctggttaccagcaatgaaaaaagccccatttggtaaaatacagtagttggattcattatctctgtgattaacttgcataaaaaagagacagttttcattgatgtgacctttagcaacaactcctaaaatattttttttccttcattcctgcttttccttgttccagaagaagttaaggtaaatggcttttagcacattgcacccccagcttttagcacattgcattatcattataataaatgtttacggttactgatattattatagttctttatcgacattattacagtccattatttacagtccttatgttatttaggaggggaatttggggacattgacccacttatgtgtagtcccctagtgaaatgacaagaatccccagagctgggaaaacatttccatgcaattccctctcagtttacatcaaaatcagctcgtcacccttgagattgaagctcgcactctgtaagctctgaataaatattaaccatctcctgaaccctgaaggagacattttctggggagcagtgatttgatgatttgatgaagttgtgtgtgtgtgtgtagtttttcagacatatctccatctgattcttacctctaagagttcctcaagggcaattgtgttgctttgtttttccttgcatctctggaggctgagcacctagtagtgattccaggtacgtagcaggtattttacaggtgcttgttgcattaatgcactttattggtgatatggtttggctgtgtccccacccaaatctcatcttgaattgtagctcccataattcccatatgttgtgggagggaccgggtgggagaatattgaatcatgggggtggttcccccatactgttcttggggtagtgaatgaatctcatgagatctgatggttttataagggggaaacacctttcacttggctctcattttctcttgcctactgccatgtatgatgtgcctttcgctttgcactatgattgtgaggtctccccagccacgtgaaattgtgagtccattcaacttctttttctttataaattacccagtctcaggtatgtctttttttttccttttttcttttcttttcttttcttttttttttttttttttttgagatggagtttcactcttgttgcctaggctggagtgcagtggtgcaatctgggctccctgcaaactccacttcccggatttaagcgattctcctgcctcagcctcccaggtagctgggattataggcatctgccaccatgcacggctaattttgtatttttagtagaaatggggtttcaccatgttggtcacggtggtctcaaaatcctgacctcaggcgatctacccgcctcagcctcccaaagtcaggtgtgtctttatcagcagcattaaaacaaagtaataaaattggtttcttagggttggatggcttaaaacaacagaaatgtatcatctcacagttctgaaagtgagaagtccaaaatcaaggtgtcagcacagccacgttctttctgaaggctccagggatgatctactccatgcctttgtcttagcttttggcattgcgggcggtgcttggtgttccttggcttgtaggtgcatcactccaatctgcctttgtcgctgcatgtcattcacattgggtctctctgtctctactccttttcttctcttttttctcctttccttttctttcctcttcccttttcctttcttttcttctcctcctccttctccttctcctccttctccttcttcttctctttgttctccttctagttctcctcctttcttctttcttacttttactcctccctgcttcccttccctccctccctcttcctccctccctccctccctccctctctgcctccctctctccctctctctttttctctttctctctttctctttctgtgtctctcttttctctctctctctctttccttccttccttccttcttttcttccttccttccttttttcttcttttttttggaaacagtcttgctctgtcacccaggttacagtgcagtggcatgatcacggttcactgcagcctcaacctcctggggtcaagtgatcttccccacctcagcctcccgggtagctgggaccacaggtatgcaccaccacacgtggcgtatttttaaattatttgtggagacggggcggggaggtctccctgtgttggccaggctggtttcaagctcctggcctcaagggattctcctccctcagccttccaaagtgttaagattacaggcatgaaccactgcacccagcctatcttaattcaatacacagtagtgctttttgttcccccatgggatagtaggtaaattaatggaggaagggagtcaactaaacaatttatttgagcaattaatggaggaagggagtcaactaaacaatttattagggctttatgtaaagccctagggttagttggttggttggttttgttttgttttgttcctttttttttttgccaggggatgctgtggttgaatttccctctgtggtgagagttgcatggggcaatgaggaggtagtccagaatagttctatggaaataggaggctttcagtttcttcatctgtacaatgagagttgaggggagctgagtcgggagttgaaatggtcactgggtatcatttccgtgggtggctctaacctgttagggctgtctgcacagtgctgagcttttgtgtttttggtcatcccaatgtgcttttcctttttcctgagagcagccctctacatcttccgtggtgtaagttgccttattccagcacgtggcatcgccagtcccagtgcccttggcagaccatgcagaatgcatccatggaatatgaaaaatgaggcccagtggggcacagtggctcacacctataatgccagcactttgggaggccaaggtgggcagatcacttgaggtcaggagtttgagaccagcctggccaacatggtgaaaccctgtctctactagaaatacaaaaattagctgggtttggtgacaaacgcatgtaatcccagctgctagggaggctgaggcaggagaatcacttcaacccggaaggcggaggtttcagtgagctgagatccagcctgggtgacagagcaagactccatctcaaagcgaaacaaaacaaatgagggtcctcatcagcgtgcctttgacactgtcctctggtcctggtgatctgaatacatcaccacagaactgccagggtacgtgtttcctagcccatagcgagtcccagtgaaagcagagatgagaaagaaaggagggacacaaggtctgggtcctgagttccagtccgtgggggccctggtgctactgctgtagttcatgaaacattcccttcgattctttgaactctctcatacctttcccttaaattcttctttttcccttatgtcaagcttctttcagtaacaactgaaaggctaatagtagtgctgtgtggggaggactttggacttggggattggactccatgggagaggtcagctccttgtctccctggtggtgagacagggaatggtagagtgtgtcctacctatgtgcctgccttgctctacatcagtgcttcttggatattttggtatcaggactctaaactcttagtagttatccaggacccaaaatagcatttgtttatctgggtcatttttactgatatttatcatactagaaattaaaatagaaatagtcaaattctttattaattcgtttataagtaagaaacctattacaagtgaacatagataactcccttcctctttcctctctccctccttcctttttttttttttttttttttttttttgagaaagggtctcactgtgtcacccaagctggagtgcagtggcccagtcacaggttactgcagccttaacctcctgggttcaagtgattctcctgcctcagcctcctgagtagctgtgactacggacacatgccactacacctagttgatttttgtattttttgtagagatggggtcccactgtgttgcccaagctggtctcaaactgaactcctgagctcaagcgattctcccgccttggcctcccaaagtgctaggatgatgataggcaggagccaccacacctggccatggataacatttctataaaatataaccatattttcaaacaaagagaaaagtggcgttgtgctacatttcttctccagtgcttggttccctagaagacagccagattctcacttcttttcctgcattcagtctcttgtgatatcacatggcatgtggcctctgaaaaactccgctgtctagttgtaaaagaatacaagtaagtagtcaagtgacaccttagcattctgatgaaaagagctttgacctcacagagcttctggaagggtctcagagacatccctgagggtcccttgactgcactttgacaaccacaggtctacatgatctgtatagccttttccagttttcacatcctatgattccaagagggaaaacaatcttccttgtaaagagagttaagtgacattgtgtccttgtctacactcagctgctaatatgctatgggacctcaggtatgtcacttaaaccttgtgttggagtttcctccttgttacatggaggtcacaagaataacaaactatgcatagatcacctaatttagtcattccaacggtgtggagagatagaggattaggatggactttatttcctaagtgagaaacgttggctttagtaaaagtgtagtggtttgtagggtcatccccctaaagatatcccgccccaccaaagatatccctaaagacatcctgctggtttcagtggctcatgcctgcaatcccagcactttgggaggctgaggcaggcggatcacttgagctcaggaattcgagaccagcctggccaacatggtgaaaccttatccgtaaaaaaaataaaaaattagccagacatcgtggtgcatgcctgttgtcccagctatttgggaggctgaggtgggaggattgcttaagcctgggagattgaggctgtagtgagctatgattgcaccactgcactccagcctgggcagcagagcaagaccctgcctcaaaaaaaaaaagtaaaaataaaaataaaataaatatatatatgcatgcacatcctaattcctgtaacacgtggatatgcccttacttggaaaaagtgcctttgtagaatgcaagcatccttatggaagaaggtcagagggagatttgagaaagacagaagaggaggagtccatgcaaagataaaggcagagggtgaagttgtgcatccacaagctcagatatgcctggagccatcaggtgctggaagagatactggaagatctcttccagggcctctggaggaagcacagtcctgctaactcttaatttgggacttctggcttccggaactgcaaaagaacaagtttctgttgtgtgtaggcacccagtttgtggtaatttgttacagcagacatagcaaactaatgcaaatgggctttgcttgaagtccctcagctgctaagggtcagaaacaggatttgaacctacagttttgaggcctgaacctgctatgcagtgctttcttcctgatagtgaaaccactgtggtcccaaacccacagggctctatttagatttaaacaagactatgaatgtaaacagacacagtgcaatgccagatccagagcaatcgaaggtcatagtttcctcatccctcgaagctgccaccttgcaacatcatccttgtgttacttccagttgtttcttatgataagtaacagtgactttgatatatccattttttagttgtgtacatggtggtgatggtgttttactccttgctataaacgcttaaggattccttagctttagggaatgaaactacttgggcaagaatataaaattttgttctattttattttaaagctctggttacatatggtcaagttgcttcccaaaaagcgtctctgtcaggatgatcttatgaacgacgttagtacctcaattttactgtcccatccttttttcctccttccttgcctccttccctctctgcctccttccttttcttcccatttccttccttccagcattatcatataagccacgtgctgggatgtaccaggcacactagctctataggtaagatatttcctaggactcatcattcacatgagtccaggagaaatacatcttttgtttgtttgtttgttttttgagacagagtcttgctcaggctggagtgcgatggcaccatctgagctcactgcagcctcaaccgcctggtctcaaatgatccacccaacctagcctcctaagtagctgggaccacaggtgcatgccaccacgcccggcaatttttttttttttttttttttaagtagagacagggtcttgctgtgttgcccgggatggtcttgaactcctgggctcaagcgatactccctccttatcctcccaaagtgctgggattacaggtataaaccaccaacccagcctcaggagaaataaatcttttaggaaaaaaaagtgacacagttttctcttgtggcttatcacttggaatgtggagagtcatttccattagggaaccaccaggaatcttggcaacttagcagccacaggagatgcagaaactgagtagtgatttaaaaattcagatcactttgtttgttcccctagaataatacattattatcattaacaaagtaactcaacttacagtatcaaatcaactgcagagccattgatattgatgttaccgtactatccaacacattatgtttagtgttgatttaagaaaatgttgattttatttgatgtcatgggtgggaaattgcttgcttttgttttttgagtgaatctggtttaactgggctgtgtaagccaaggagttctaactcttcttgggcaactgagaccgtggctaatatttcattatctgtattaattaaagacagggcctggtacttgacatggcagtgtgatgtgtccaaggttagacccgaggtaagaatttagagcacagaggcacgctcacatgaagctgccaattcctctgctttttcaggtagaggctgaatgatttccgcacctttttatagattgcatgacttcaaagatgcacactaatactacggctccttgggaaatctttctgcactgatccctttgaatcttcagtgtttcaacatagacttgttacaaagagaaggaatataagcctctgttctttcttgtttccctttgttaattcctttttcctttcattccttcttatctatccctttcttaccttctttatttcctcgtttatttgggctttttcggttgtgaagatcagtaccttgaaattcagaatagatggcatgaagcacttcagctttgcattcaagtactcatgtgtatgatcaagcatcgtcatgatcattattgactggaaagcctgtaagaagaagcggataaggccagggtgcagactgggcagtagttccctgtcatgaatccactctgcagttgttttataacatgcaacaaaaactaaagtctaatagcactccccaatgccaattttttttctttctcttttttttttttttttttgagagacagggtcttgctttatagcccaagctggagtgcagtggtgccttcacagctctttgcagccttgaactctgggctcaattgatcctcctgcctcagccatctgagtagttgggacaacaggtatgcactaccatgcccagtgaatttaaaaaaacaaacaaacaaaacactttttgtagagaaagggtcttgctatgttggtgaggctagtctcaaactcatgccctcaaatgatcctcctgccgtggtctccaaaagtgctgggattacaggtgtgagcccccaaccccaaaacttgaatctgggccacctttactgacttacttattactatgtagaatatggtacaggtgacgctgcagactcttgaagttaggtcataaaagatgatcctgcttccgtctggttgtgtctctcactcatgggatgcttaccctcaaaatttggccaccatgccatgaggaaactcaatctagcgtaggtaggaagaccgtgagaggcccaaatagagaggaattgaggccgccagtcatagtcagcttcagtcatcagataggaagccaacaactgagccctcagatgattccagtttccaaacactgtgaagcagaggctgactgtcccctttgtgccatattcaaattgctgacccacagaattcatgaatagcgcatgtggtagatttacacttcaaagtctttgggtaatttgataaagatgtggtaactgggctatgctctaatcaataatcttagctaagatttatcagaaattaaaactgtatacttaactaaccacctagataggtgcaggcatatatgaattcaccgaaatttgactcaactcccttggttaatttaaataaaataaaagtaaataaggggaaattgcatactcctatctggactgttttcttatggttttggaatctctggcaggtagaagtaattatttctgtaactcttaggcagggcttaggaattatctcccttaggtttgacttctttctttcttgagaataagcgctgtgtttcgcaagagtaaagaagtggcatttattctgttgtcacagcattactgagctcgagtggatggctctttatttccttctcgtcttttcttttctagtctttgtcaggacccattcctttacccctctttgcttttacggttttcacattttaataatgtaaaaccatgttccccaaacttccgccttttttgtcccatttgctccgctgttacatcatttgtttttaattacgttcatatttacttatgtttttatgcacagctatttataaagaagattctataatactaaagtaaatagaagagcaatatcatttgccataaatacaaaggatccctgaaaataaatatactgccagcctgggcaacatagggagatcactgtttctacaaaaaataataaattagctgagtgtgatgttgtgtgtctgtagtctcagcttcccagaaggtcaaggcaggaggattgctggagcccaggaggttgaggctgcagtgagctacaatcataccactgcactccagcctaagcaacagagtgagaccttgtctcaaaaaataactggctgggcatggtggctcatgcctgtaatcccagcactctgggaggacgaggtgggcggatcacgaggtcaggagatcgagaccagcctggccaacatgatgaaaccctatctctactgaaaatacaaaaaaaaaaaaaattagccgggtatggtggtgtgtgcctgtagttccagctactcggtagcctgaggcaggagaatggtttgaacttgggaggtggaggttgcagtgagccgagatcatgccactgcactccagcctgggcgacagagtgagaatccgtctcaaaaaataagtaaataaaataactaactaggctaggcacagtgggtcatgcctgccatcccagcactttgggagtccaaggcaagaggatcacttgagcccaggatttcgagaccaacctggacaacgtacagagacctcatctctacaaaaaataaaacagctaggcatagaggcacacctgtggtcccaggtagttgggaggctgaggcgggaggatcctctgcacccaggtagccgaggctccagtgagtcatgatcatgccactgcactgtagcctgggtgataaagtaagatcctgtctggaaaaaaaaaaacacaaaaaactaaataagtcgtccatccgtccatctattcatacacacacgtaaaatgaaaactaaagcaaaagagtagtattaaattctagttagagacttaggatttccagtgactgaaattggaatgttaggtgttaaagacacacatcaaaatgagactcttggttttttttataagtgcaaggattgcaagatacctgaaaagggagtatttttcccccacatgcatctcaggagggtagcctcagatataagcttaggagtcctgaatttatcatcaatatttatatcgctgtttggcccctaacaccttccctatgatagccctaattggaatatagtaaatgtttgttgcatgaatcaacctatttaacctgtgcgtccttaaatcttacggtctgcgggttgacatttctagtgaagggagacatttctttacctacctgggacctcagaccttggacctcactgaacttgagagcagagctggtttatgtgtaactgaacctgatggttagtttcctgtttcaacttgattaggtcccagtcacagggtgcccacatgtttggtcaaacatcactctggggtgtctgtgagtgtgtttctgggtgaggtgaacatttaaatcagtcacctgattacagcagattgttctcaagtgcctgagcttcgtctcatcagctgaaggtctgaatagagcaaatagactgaccctacttcaaagagaactccttctgcctgatgactcaggtggggacttcagtccttttttttttttttttttttttttttttttttttttttttttgagatagggtctggctctgttggctaggctggagtgcagtgacgcaatctcagctcactacaacctcagcctcccaggttcaagcgattctcctgcctcagccttcccgagtagctgggattacaggcacccaccatcatgcccagctaacttttgtgttgttagtagagacagggtttcaccatgttggccaggctggtctcgaactcctgacctcagatgatccacctgccttgacgtcgcaaagtgctgggattacaggggtgagccaccacgtctggcctgacatcagtcttttcctgccttcagacttgaactgaagcatcagcatttcttgtgttttgatcttgctggagttggactgaaactacacatcagttctcctggctctccaccttgcctatagcggatcttgagactttttcttattttatctatctatcaatccattggtcatcaggttctccagagaatcagaaccaataagagatgtcatacacaccacacacaaacacacacacacacacacacacacacacacactaatatggttctgattctctggagaaccctgactaatacagaggcaagatcctgttttgacgtgcttgaactcgaggacttatgccgatgttaactctgagtgttcctgttttatactcagccatacagatgctcagagcatacctgcacaagtcaactttttgtgtctgcaggcatgggcctgccctgtacatgaggagacagcagacagttcctctccctgctgctggcctcttcatcttctcctggcgtcaccacggccaccgtgatgcctggctcaagtactagttctatgtcaatgatggtaccaatggactctaactttagaatgttgttgactgaaggcccctgccccctgccttgctttaggtggaggatctggtcaaggctttgtgaatcaggggatgctccacacctttctgctctctgcaacagggccagggatctgagtcccttcttgtctatccagaaaccgtatacccagtgttctctttctctcacctccgaataggtgggccttcccaatttacctgtgagaaaactagtgtgccacctcaagcgattctggcctctgttgactgtctgaaccctgtgttttgttgagtggtgcagactagagatgaagacagggattcggcttcgcttgctttatcaagggaatgttcttgggacaaatgtgtgacaggtgaggaaaacaacataggaaaggagacagaagtgaagagaagatgtggtctcaaatgaagtctggcttcaggtttatccttggggggctctggaataaaaatcacacctcaaacttgacccgcttgaggccagaaggccgggctgtggtaccttcgtgtcggacagtcataggctatcctcatggggacctgtatgttgccaggtgtcttgggcaaggtggacaaggatgccagcaaagtgaaattttccagagaaggtcacaaaagctaggaaatggcacagcagctgctaaaaggggatctgaccaggccaccaacagcttctgcttcttcccaaagtcacctttgctctctcctgaccaccgttggtgtctcaaagtctcacatgtgacaacacacatatcatcaaattcatgagtatccatggcacacaatgttttccttttcttctcttctctttctttcttgttttgttttgttgttttattttgttttgttttactgagataggatctgtctctttcccccaggctacagtgcagttgcgtgatattagctcactgcagcctcaaacttctaggctgaagtgatcctcccacctcaacgtcctgagtagggagggcactacaggcgcatgcctccacatctgactaattactaaatttttaaaaatttttttagacactgagtctcaccgtcttgccctggctggtctcaaactcctgggctcatacaattcccctgcctcagaatcccaaagtgctgggattataggcatgaggcaatgtgcccggcccacaatggttttcatatagctattgtgtattgcgttattgccttagtcacagaagcccataaaaaacagattccaataaagagactaggtttgcagagtgatgagtggggcccttgaaataattacatttagtgggttatatgtctatttttttggtcgttccttgctcatctgtctttatttttgtttatttatttattcatttatttgagatggagtctcactctgtcacccaggctggagtgcagtggtatgatctcggctcactacagcttccacctcccatgttcaagctattttcctgcctcagccttctgagtagctggaattacaagcgcccgccaccatacttcgctaatttttgtatgtatatgtgtatatatatgtatataatatatatattttttagtacagatgcggtttcatcatgttgatcaggctggtctcgaacttctgacctcagaatgatccgcctgcctcagcctcccaaagtgctgggattacaggtgtgagccacaatgcccagccttatatatgtatttattaagtttggggggaacaggtggtgtttggttacatgaataagttctttagtgatgatttctgagattttgatgtacccatcacccgggcagtgtatactgtagccaatatgtagtcttttattcctcaccctactcccacccttctccctgagttcccaaagtccattgtatcattcttctgcctttgcatcctcatagtttagctcccagtctacagggttatattaaaagaggaaaaggggtataagaatctaggtatcatggatgatgtcctggtcctttgctgagtcccatttttttcttcctcacctgatttcccccatctggcagaaacttttacagagtgtttgcagaagagaagcctgtaaactctggagtgtgtcctgggtggtttgtccttgggccactttattccctcaccgatcccttccaaaggccatgagttcccagtcagtcatttccctatatcagtatttattgttttaatcaattttccccatcccaagagaaaggcaccaacatgagtccatgtgttttaacatagcaggggtttccctgtcagagcccggtggacttctgtggccataagcaagtcaaggtgggctcctaagtggcagctgcccacttccagaaagctagaggttctaattatgtcttcctgaaaaacagttcaattaggtaaagtgacattttttaagcccttgtgtgtgtccgactcataaaagttcagaaggttgttactgagaggagactgcagtcattttaagatttcagtagctgctggagttgagtagataatttttcccctttctaatattatatattaggtgtgctcttgtgtctgggtgaaacagagcaatcacaatgattgttttttcagtatggtaataattaggcataaaatcaatatttatgtgtaatgtgccatttgaagattctccctgtgtatgatgctgggttttacaaaggaaaatctggattcaggtggccaatgaagtgtcacgatataaaaagagaattttgaaataatgagaattccactcctttgggagtattggcatatgttaaaatacaaatatatctgtatttttctcacttttattagaagagtgcaagtttgttcaaaacaactgctggattatctagtccctgaacagccatttatatttttgttacgcttgtggtttttaaatcatcctcatttccttgatcgcatttgcttctcctggctagaatgtgtaggagacgggtcggggagactgtgcccatttgacaggtgtgaatgcgaacagaggctgcagctggttagaccagggctgtgcaaccctagagccattgccttgaccacaaagccacagtctcctagtcctaatattaagaggtaggaggtagatagagattgtcccttaagccacattccattcttcatatttttgtacccattagagtagtgctgatcatttgccttcattgctggggtcccctaaatgcaacttctcatgctgccaatttagtcctggccctaggaagacgtaggtgataggatagaattcaacaactagaagccatggtttcctggttggatagacttcctctgccaccagaataaaggaatagagggttcctcactgtgccccatagctgcaaagtcacaggaagcttgcagcaggccagtggtaacctctgagtgacttctgagttcccagagctaggaccatgacttttcccctggattcttaagtacccggctaaaattgtgtttgccgaatgaaagtgtgatcctggaggccatgttgtttgtggttcatggaagggtgcttgttcagcttggtcaaagcaagatggtcatactgggttttggtgcccagacgttcccaacactcgcagcagagggcattaggatcatgtttagccaacaattttggaggcacccaacagtgattggatgtcatgtgctttcagaaggcacactacacatcttcggttcctccaagctctaggaaagggttgtggaattgggttgggtgacaacaggtcggtaagaagagggctgggctgagtgtaaagaaattccttggctgggcatggtggctcacgcctgtaatccagcactttgggaggctgaggcagataaatcacctgaggttaggagttcaagaccagcctggctaacacggataaacctcgtctctactgaaaacacaaaaattagcttggcttcctggtgcatgcctgtaatcccagctactgcagaggctgaggcaggagaatcgcttgaacccaggaggcggaggttgcagtgagccgagatcgtaccattgcactccagcctgggcaacagggagagattccatctcaaaaaacaaacaaacaaacaaacaaaaaccccagatattccttattatggaagaagaagcaggaaatatgtttttgaataatctgggtcagagaattgtgcatttattattgctaggatgcatatacacattgaactcagtcaacttactctctctaaattatctcaccggtggagacattgcctcaggagtcgagccctgtggtgtgcctcctgctgtcaccacatttgaccacctaactgaccccactgtggtcacctttgccacctgccctgctttggtcccttctctgcattcgccccatgccatgtagcactgctgagtttgaaaataattgcatctcctgaaaactccatttcttagagagtgagctccagcaccatcagcctgaagttgaagaaatgggactcaggaaggctggagtcttcaggcgttcttacaatgctgatgcgactcagacggctgcctgcactgtcctctgtgcttctaagtgaaattacccgtcggggggctcctgagagttaaatcaagcagcctctcttgaagcacagtaaatgctgacgtgatttgtgaagatggctctgctaatagggttggcagcgtcctttggcttggacctttggaccccggctggctgcggaagggagggaaggcagccttggaaaactgatttccgttgccctctgaccatgagaagatccctgtttaggagctagaattcagagttccacgtgtagagggggattccacagtgtgtggtgtgcagagagcactcgtctttcaggcatggggcgccgtttcatttctcctagtgctggaaggggacttggtgaaattgatttggcaaaaaggttaatgtgttgttatggctgccagttggccgattgaagcgctagtaattggggcaagggaagcattcaatttgacacaccaaatgcaggtccaccctggtggatatcttggttgcagcactctgtgtgtgtacgtgtgtgcatgagcgtgtcttagagatgcttttgctcctcttataactcctatgataaaaagagttgccattatcatcctttgtctactcaccagcccccaccagaaaccctcacagaaaaaataagagtttattttttcactatgtcacattgttggagaactgtgcaaatacaagcccttctcttacaggccatgggtctcctaagtgggatacaccacgatgatccactggggcagtggccagcaaagtccctgtccagccagccactcgtttttatcaataaatttttactgaaacacagtcatgcctgttaggttaggaactgcctagcgccacttcacactgcagtaggagagtgagtagttgtgacagagaccatttatcccacaaagcctagaatctttattataatcctgtaacagaaagcatttactgactccttagcattgccatgtttagcaaataaaattgcaggatgctggtcaggcgcggtggctcacgcctgtaatcccagcattttgggaggccaaggtgggcagattacttgaggtcaggagatcgagatcagccgggccaacctggtgagatcccatctctactaataatacaaaaaatagctggcgtggtggcgcatgtctgtaattacagttactcgggaggctgaggcaggagaatcacttgaacctgggaggcagaggttgaagtgacccaagatcaccactgcaccccagcctgggcgacagagtgagactgtgtctcaaaaacaaaatatctggctgggcacagtggctcatgcctgtaatcccagcactttgggaggctgaggtgggtggatcacttgaggtcaggagttcaagaccaggctggccaacatggcaaaaccctgtctatactaaaaatacagaaatcagtggggcatggggcgggtgctctgtagtctcagctactcaggaggctgaggcaggagaattgcttgaatccaggagacggaggttgcagtgagttgagactgtgccactacactccagcctgggcggcagagtgagacgctgtctcaaataaatacatacatacaacataaagtaagatgttaaagtaaattttaattttagataaacaatggataattttttagcaaaaggatgttccacatttaactggacattatctctgtctctctccctccttacctgcctcctatcctctcttcccaccccctacgatgtctatgtatagtttcaacctggcaaccctgtgacctcagcactaggatatggatagaaaacatagtagcccctatttacctttatcttttatctcaacccatttaaatgtcttttccttgcaatgttttgtaatattacatgtagattgtacatcgtttgtcgataaatcagtgtacaaatactaggggtgagtgtgctcaaaacttatttttactgataatagtccatgatcaaggcagtttggagaccactcaggacagggaaaacgcagactcatgtgacccatcagggcttcagggtgtcctctggtgaagggcagcagcaggacagagccccacttctagctctggctcaggttaagtgtttcagcgccctggcttctgtgtcttcatgtgcaaatggagataatagtcagcacctatgcaggttactgtgaaaacaggttggaagtatttatctacagcgtggaccagagcctctggtatgtactaggtgccctagaaatgttctttcctctgactcaaatgacaaatcagtttctagggaaaggaacgcacagcgatccccagcgcatcacgagaaatctctctccagctttgccctggctgcgctggtgactcactcggggctaaaactgtttatgtctgcggagtcagagcgttctgccctgcggtttcagttcacatggggttgggcgacacagttttgttttcactttggtttatcgtgtgagtttccatccatcaactcttttgtatctgatgttcttgggaaactttgcgggaattcacttgaaattgtccagtgaacagccattgcgagtctcatggtcagagccgggggcttcccagtgtagggtctggtcaaggaaagggccacttcctgggcctcccaaaaagaggaaggagaaggccctggcttgtggaagagtaagaggggcctcgttaatgtctcccaagcacagtaccccaactccccacatacagtcccaacccttactgcagccgggaggttaggtgtctgccgtgctcatgaacaggaagtgaacccgatcagcccccgaaggaaacatccgtctctctccttggaggagacacttgagtgtctttctctgtgtgctgcagccgttattgatatcagttcccaggcaaggttcatgctggcagaggaggccactctttctgcactggagagcaaaagccatcttatctctctgagtgcaaggtgacagtgaggagattggccctgtgtatccctcagagaccagtattccctcatttgccaatctagaaagaagactgtgtttgctgtcatttgtttcttaactcattgattctcaaacagaatcttcccagggatctgcttcatgctgtattttgtactgtgtcctgagatgatgaggattcggtgtctaccctcaagaagcatcatttagagaagaaattagaaaagtaagtgaggcaggagaacaggatctggaggcagggaatctaaggctgattcacgttgactttgtataattaaatcaaaaggaaaacaccaactttccacaactaagttataaaaggaccagaggctactccctctgcaacccctccccacttttctgagttgcagatggaaaattgaaagtacccctgattggttgctttccacgaccattcagccgtttgcataggagctgtaactttgtaacttcgcttcaccctctgattggttgcttttcacaacctatcagacatttgcataggagtgtaacttctttccacaaccaatctgactgattgtgggccattacttcatttccatgaggtgtacaccaagtggccaatgggagacctctatagggtatttaaaccccagaaaattctttaaccaggctcttgagcctctatgcttgggctgctcccaccgtttggagtgtactttccttttcagtaaatctctacttttgttgtttcattctttccttgctttgtttatgcgttttgtccaattctttattcaaaacgccaagaacctggacgccctcctccagtaacataatgaatgtctggatgtggtatgaagagtattggggtacaccacagcagcgtgtgctctgagaacacagtaaacaggcatttgatacagatcagaaggtccgtaaaggtggtatttgaactaagttttgagagctgggtaagagtttgtgaaaagacagggcttaaggaaggatatagtaagctgaaggcacaggactttagaaacacataggctataactgcaaggtgtgtctcagaaggtacatgtgacgtttcatttttatttgtttgcttttttatagtgactgcatgatcattatatgcagaagacgcttgaaggggccagattaggaagggcccatggtccacactgctttttttttttttttttttttttttttgaaacggagtatctgtctctcacccaggctggagtgcagtggcacagtcttggctcattgcaacatctgcctcctgggttcaagcaattttcttgcctcagcctcccgagtagctgggattacaggcacctgccaccacacctggctaatttttgtatttttagtagagatgaggtttcaccatgttggccaggctagtcttgaattcttgaccttaagtgatccacctgcctcggcctcccaaagtgctgggattacaggcgtgagccactgtgtatttctattaccagcctgcactgcatttctattacccgaaaacagtgtggaaaatattaattacaagggagattaaaaagtaaaactggttggttggcctgaagacccacatggtgacttcactaaagtcattgggtaagcaaagaagagcaacactctagttttcctccaagcttcaacgttttctgtttcctcctatgtcaggtcttaatttccctacctgattcaggctgcgctaagctgacttcatcatgactcctggcttccccagtccctgcttcccagcacataccatttattcagtgttggccagtgacgcctgccactgcattttattgatgaagaaatggagatctcaagaggtaaaaaaaactgactataggagccaagactagtttagagtggagtttgaatatgaacatgcctctgtctgtgaaagccagtgtcccttcagccaggatctttcctggaagaactcagtattaaggcacttgattagttcttcctgttggtggactgattgattacatttgaatctttcagcaagcttttggctgagctgggcatcttccccgccttcctccacctctgccttcaaaagcctgaatttccaaggctttctgccatgagtacttagctttgaaaaacatgagcatatttttcattcttcttgccggcctctccctgtgtcatgcctgttattcttttctccctcaacattgacctaggtcagaaggaccctattttaatgtttagcgtttgggggtcactccatagagaggggtttgtggaaatcctttttttttttttttttttttttgcttctttctgtggatctgtttggaaatgtaacattttaaagcccttcttggctggaggattttttatggtaaacataaaacgttcattgaaacattaaacattttacagctgtttttcagcacataaattttcatagacatccaccccctcactgccacaccccctcatagatttcttcttttcctcctccttctcctcctccctcttcctcctctttttccccccccttcaaatagttccaagaccagagttgagggtgggtgggtagagggctagtttacagataaaatggttggtgtagatcatctagtttggaaaaagcacattgtattttaatactaggaacgtgtgcatgccagaaacctgccaaggaaaacactcccgctgctccttccagccctgactccagctgctatgaactggaaccctgcaccacgtctcagaaggctactgggaagggccataatctgtatccatccacaaggagaggtggaggggggctactctaagaagccaaaatgctcaggaaagccagagctaagatggtgcaaaccagcatgtgatttgtccaaggacatcgttttgatatgatgaaccatgggtggtttgggcatttgtcaaagcagggtcagcagaaagctgacgtagttgggtctaaagtacaacaggactgagcatggtggctcacacctgtaattctagtgcattgggaggccaaggcaggaggattgcttgaggccaggtgttcaagaccagccttggcaatatagcaagacattgcctgtacaaaaaatttaaaaattagctgggaatgatggtgcatgcctgtagtctcagctacttgggaggctgaggcaggaggatcaactgagcccaggagtttaaggctgcagtgagccatgatcatgccactacactccagtacactccaggactttaggcctgctaaagtgcattgtagtaatactagatatcagcacccttgccatggcctcatgagcagtgaaatgaactttcttgctcctggatttttggctcttggccttgtaatttttttttttcatgggatattagtcaacatgatgtgagcagagtcttgagatgtgcttgcatgattggctttgtactcctgcatttttcccatagccaatgccttttcttcagcttgggctgcagaatgagatagatgaaacagacctgaatctgacttataccctggagccattttcagcaaacccagtcaatatcaggccaacctcaaccaattcttagactagtgagtgaggaaaataaatatttgatcttgtgaacccttgaaattttgaggttgtttgttatgcggcagtattttggcagtagctgatgaatacaccactccccatccctagtggcttcctataccatttagaataaaaatacacgctcttttccagggtctacatgtcctgaagacctgaactcctgcctgcctctcagtttatttcctacctcaagtagctgtgcccaatgtcctcccaatatcctgcaaccactctagtcttctttcttttcctgggacccacagagcctatatctgcttcaaggcttttgtacatgttgtttcttttgcctgggaagagtggtggggggcactttcttgcccattttttttttttttttttgagatggagtctcgctcttgtcatgcaggctggagtgcagtagcacgatctcggctcattgcaacctctgcctcccgggttcaagcaattctctagcctcagcctcccaaattgctgagagtacaggcatctgcgaccacacctgtctaatttcttatctttctaacacagtttaaatatcactttctcagaggcctaccctgaccatcctacttaagtaacaataataaaataaaaatacccatcatttatgaagtgctcattatgtgccagcgttcttagcatctcccaacaaccctaggagacaggcattacaatgagccttcgtaatgttcagatgaggaaactgaggctaagagagccttggcaagctgagttacttagctagcaaatggtggagtcgaattcaaaccctgcctctcctcacccactctgtttcttttcttttgagcacttaccactttctgaatatgtatacaattgtttcctcgattactgtctgcctcttcttccctagagcgtcagcccatgagcttatccagcctacagaggagatgctgcagcttggcagagcatggattgctcaacataccagagtttagtcctacctctgtctccaagctgctccatgatcaaggataaactataatctttctctctgcctcagtttttccacctgtcagtggaggggcatgctcttggatgcctgagtttttcttagactcagcatcctgcagccgaaataaccatgcttcttagtggtcctcttgcgtagcagcctaagaaactccaagtccatctgcgccgaagagtattgaacttggccagagcacttgggatctgcagaagtgtcccctgtctgttagttttttcacagactctgctctttctctcccagaccggaccctccactcctctatctcgcatttatccattgcaccccgtgtcattgccgaattcctgagctacaaaggtgaacaggcaccaaagctagggcagtgtccactcaatacatatctgatgaatgaatgaatgaaccttgtctaccacagatagctcaccacaaataaacattttaatctactataaaatagctcaaaagactctatgcaaataattactgttacccagtggtggaagtgcttcactttttatggaaagtctttcactcatttctatctgcagtatttactgggcatttttccacgccaagccctggggatacagagttaaataaaatagaagcttaatccaggcatgctggctgtaaagttcacctttcggctcctttctgccattcttattagggtcttgccccatcttggcagcaagcctgctttaccattggagacctcagctctgattacaatacgtccgtgatcaacatgccctaactggttagcagatggcagctgcatgaagtcactgggcccagataggaatcaacaagggagattaggtaaagtgcttatttgaggtgctgtcagggcccgtggcaaagggttccctcattccctctgcagttatttttcatgcacactcggattacactgctcggtgatattacatctgcatgcgtcttgccctctgacacggcaaacacagatgctgcccaaatccttgtaaagccatatatcttaagtaggaaggagcatctttgcaggggaggtgaattgatttgcaaagcagcctgacacatggtctcttatttctccttgcaatcaaataattcatctttatgcccgtagggccgtggtgaaatttgaacctgaccaaatcaacgactgcaaggtttatttgtagcagtgggatcagagaaattagccaagtgtattctaaaattatcaattgctgatcacatggtctggatgtgttttagtgcttaggggttggtggaccgaggctatggtggcatagtcctccatgaccaagggctgtctgcatgggtacgcagataaaacatgcactgccatggggtgacctgtgtgccatgcatcacacacagactactgtttaaccacctacatcataggtagatcctgcattttacaaatgaggaaacagagctcgagagaagttcaatcctcttccctacagagaggaaaggggaaaaaaatggactttcaagacagctgaaattcaaaacaaaacaatgttttaaaattgaatacagccttttgcattaaaattaccattttaataatagtttaaaagagagaaagagagagacccaaaatagtcaaactgaggttttgggttctggtgatagaatattaaatcataatgaagcatttaatgttttgttgttgttacaattgttgttttaccctagggctatgcaaagtagtttaaggatgtatttatttcagtggggaaaaaaagtggaggatatacatttggaggataaggaagcatgaattagggtggaggaagtgttttctggtctagctaaggaggaaaaattatagacctcaaaataggtgtcatttaatatatatctgtgaaaatgggccaaatagattgcctccgttaaagccgtattggatgttcaaatctcgagttacctgaaatgcaactgtacttcctatatttaaccaggctttttataaactgttcctcttaacacctcaagctgacaaccacatcctgggtggttatttaataccaagtttgactttcttcactttgagggtcctcaaaatagaaggtcagagagtagacttttaaaagtcttgcactgtttacaagtcagatgctttttggcagagtgactctcagctccccccaacaatcccttcttgtcgttcagtagtagatagactctatcagggaaaaataggagaaataaaataagacagcatatggaaggcattgctgaaagtctttttcacaccttaaaaacaaggaagaagagaaatgaaaataaaatagtgagcaacacctcggtgaaagtagaggtgtttgtacagttcagctgctgccttattcaaaaacaggaagaaaaacccactgcccaggtcagctggtgggtgatctccactgaactcctattcagaggctcagtttctctgcaggacagaaatgagaggcacaaaatttcatagctgtcttgcccctcctgtggtctgtaagaatgggaccaggactcctagttgtgaacccgaaaggatttccattaggatcaggaagtgtgagttggcttagaaaaagtaaagaaagaacagtgctgtttcatttatttatcatgtgtaagtaaactgggatttattttattttattttttattttttgtttcagtttcggggggtacatgtgtaggtctgttacatggatatcttgcaagatactgagatttgggcttcaattgaacccatcacccaaattagtaaacatagtactcaataggtagtttttcaatccttttctccttccctccctagtccccccttttgaagtccccagagtctattgttcctgtcttcatgcccatgtgtacgcagtgttgagcttcgacttgtaagtaagaacatgcggtatttggttttctgtttctgcatttattcgctcaggataatggcttcaagctgtatccacgttgctgcaaagaacatgattttcttcttttttatggctgtgtagtatttcgtggtgtatacgtaccacattttctttaactaatccaccattgatgggcacttaggatgattccatgtctttgctgttgtgggtagtgctgccaagaacgtgagtgcaggtgtctttttagtagagtgatttattttcctttgaatgtatacccactaataagattgctaggtcaaatggtaattctatttttagacctttgagaaatctccaatttatttttcatagggacaaggttgcagagaaaagagaagagtgctgtttcaaacagttgaaaccattcctacttccaaaaagaatttgactcaaaagggaatagtacactacatataaaagacagatgtatttaatttgtgtttcgaactacatatcagaaattagttagaagaagatatgagataaatatacctggaaactttatgaattatttctgacatctagcattaaatttagctgggtttcctgggagtcaaaagcaaagagttttcaaccaaaaaaaagaaacagaggtgtatagtaacacacctctgtcctgcaacataactgtaagaatttatcagattatatatatatatatttatcagattatatatatatttatcagattttatatatatatatatatatatatatatgcatatgtttgtatataaatatacatgtaaagacccaaaactcatataaaaagacaaggtgatacagcattttaaaacagtttactaaaaataacaaaacattcttccatcagtcatgcatgccttatatttatgtagatacaaaaatagagtttgatattaaacaatactccaagaaagccatttctgcagagttaaaaaatacgtaggttcagttccttaccaacacgtagacatgttgtgatgaaagaaggaaaggaaggaaggaaggaggaagggaagaaggagggagggagggaaagagagagagagaaaaggaagagaaaggattttctagaaaaagaaaggaaggagggagggaaggtaagaaagaaattaattcccattttagagtaagactggaggcagagtggtcacccagatgaaaatgaataacccaactgtgtctttcttctggtgcctccacgtggaagtgggctgccacaatacttctaaagagaattggcatttttctttaaataaggaggaggatgaggagagagacgacacaaaattcactcacagaagtgaacataaattctaacattggtaaaactttgtctttgttttaaataatcagtcagttgtctcaatccataaaagagtatctcttgtacaatgtctgcttttgagtgattcacttcgatgcgtactgaaaatatacctttaagtagttgagtgacttgaaatattggtaaatgttctttaatattttgtctgtcagtgttagagactatcaggttaaaacaaagatattctttctttcctttttgtttttgacggagtctcacactctgttgcccaggctagagtacagtgatgcgatctcagcttactgcaacctctgcctcctgggttcaagcgattcttctgcctcagccttctgagtagctgggattacaggcacacaccaccacacctggctaatttttgtatttttagtagacacgggatttcgccctgttggccaggctagtttctaactcctgacctcaggcttcccaaagtgctgagattacaggtgtgagccaccatgcctggccaagaatattctttctaatatgatttagctaacaggttcagcagatttttaaactcactttcaaatcatgataaaattctttaagataaacatttgtcttctgttttcccctgagagtggtttagcatttatggagccctgctttgtgctaatgagtttatatgccctgtcttctttaatcttcaccacaactttatgtaataagtagtctccaataaatttaatcacataattacttaaatggcctggcgagccgccttacctagctggccaggaattccaggagtcaggcttcctgatctaaatctgtcctggtcccatcttggctgggtgccaccagcagcaacggcacactccagcttaaatatcagtggggataattctaggccgtttgtctgcctggttcttccaggatagaggcagtgatttcagtaatctcttagggctgggcacggtagctcacgcctataatcccagcactttgggaggccgaggcgggtggatcacctgaggtcaggagatggagaccatcctggctaacatggtgaaaccccgtctctactaataatacaaaaacaaaattagccgggcgtgggggcaggcgcctgtaatcccagctactctggaggctgagacaggataatggtgtgaatccgggaggcggagcttgcagtgagccgagattacaccactaccctccagcctgggcgacagactccagcctgagcgacagagtgagactccgtctcaaaaaaaaagaaaaaagaaagaaagaacctcttaggcaactctcatttcattatccaggtacaaagacaatgagtaagaagagtattggggttgggaggaccagtcacccctgtgtcttaagatacttctcagttttctttgttgcagcaaatattactgcagagttttagtgcattatagccttcttaaataaaacttgcccaggtgcagtggctcatgcctgtaatcccatcacattgggaggccaaggcaggtagtttgcttgagcccaggagtttgcgaccagcctggctaacatcatgaaatcccatctctacaaaacataaacagaaattagctgggcattgtggtatgtacctgtagtcccaggtactcaggaggctgaggtgggaggattgcttgagcctgggaagtcaaggctgtagtgagcaaagatcacaccactgcagtcaagcctgggtgacagggcaagaccctatatcaaaaaaaaaaaaaaaaaaaaaaaaatatatatatatatatatatatatatatatgtatatgtatatgtatatataaatttaaggaagcatagaattgaagaggctattccaaggtcacatgacttttaagtggcagaaacaggggaattctgtctaacacaatccaatttatccatctcaagaaaagagatatgccaaagagaatgattattaaattatcattaatgtgaactcttgtaattactctcataattttctttaggcttatcccattgggcattgctaagtattattagattgtgattataaatggattccgccaggcatttctcttttgctctgtggcagctctttctctagagaacttggtccctggggatgccatcttctctgtcttcactcggtgaggatggactttaggatgcctcacttctcttcctgagattcttgcttccttcttccttaagggccactgatgagcaatcagtgagtttcaggaagaaggcattcaggctgatttcagacagcctaaggtcagtgtgcaagttagtatgtacctgtgtcttattattgaactggtgaatgaatgaatgactaggtcattatgaatttgtagatcagggttttgaagagtttggcaccggatttgaaagccaatgttctcttagtacctaccgctttcttttcctcaccttcctggatttcctgctcttaaggttttttgtttttgtttttctctccaaataaatggtatttattaaataaaaattcattttctcatttatcaaccagttgcagtctttggatgttttaattatataaaaaaagcatggaaactgggcattttaattagcaagtacagccttgacacaaataaaggcatggctttggttatgcagtgcatttatttggttttcttgaaataagaaaaaaagatttcttctccatcaccagagttgctgagtttgacagtgtgaatgagatgacctctaaggcctctacttatagatctgcacggttgggcctgggagctgtactacctcagctggtgggtgataacttactcacagtctgtgctgtgtcctgcactgtccattatctgcaggggtggtactgctgtccccagggaagagaatgctgtccacaaagagccagccatttatactattaaaagaatacacaggagttgaacaatgagaacacgtggacaacgggaggggggaacatcacacaccggggcctgtctgggggtagggggaaaggggagggagagcattaggacacatatctaatgcatgcggggcttaaaacctagatgacgggttgataggtgcagcaaaccaccatggcacatgtacacctatgtaacaaggctgcatgttctgcacatgtatcccagaacttaaagtgaaaggaaaaaaaaaagtttcatcaaaaaaaaaaaaagaaaaagaaaacaccggaaaaaagagactctcttccttgaaggatttaattccaggaattggagaatgtcttgtacatttcgagaaggcaatatagaaaatgcagtgggtagcccaggactcctggtccaggtaaagcaggccttgttgctattcccctggaccatgatattacatgttgggatgatggggtcttgtgatactgattaatttaaggctgcatgatgatgagggaggaacaaagatgttcttgagtcagtacctgccagagtggctgtatcctggtgttgtaatatcaaataattctacattatttagtaaatagccctgcccgaagcctctcagtgccacacacccactgggattcctgtgtgatttgtcacctggaggaacatcacctgccttggttggggagaggaagcctcaggaccctgcaccagggccatgtgacaaatacccattttgatagttcagtacccgctattaaatatgccgaatattattcctgaaaaggggcatggggataattacaaaaacatacctggttccactctcactttcgccatttaatagctttgggtctacaagtaaccaccccagatttttctcctcctctatgcaccagtcatatcaagaattactgtaacttcataggatttttgtcaggacgctatgatgagaagaacatatgccaaggagacagttttctggcaaatcagaggcctgtaagaaatgatggctttttgcttgtatgaccaagtctcttggagacaaggcctcatgtatgaactctgaggcatgagaaggctcagaattcaccccatcttcagtcttttatttgaaaaagggaagaatgatggaaaggggaggagagagtatataaaacacgaacggggatcctagagacttgaatttctagtatgtactgcctctggctaatagggatctttgacacatacgctttttctccctttccagctggccctgttgcttaaagtggcagaagtagatgtcatgttggcagacagttttgttcactgtcaaaactgggtttatctaatgtgtatttgaaacaaacaaaaaaaaatcaataaaatgagcagctttgggagccagggtgaaggcggttgagataggacagaactccagaggactcttaaacattattcaggaagctctgaagctccctcagtctgggattccagaaaaagattgattaggcaatagtttaccttagaccatgaggagatggactttagccagaacacactgaaaaacacgagaaaagttggaagaaggaattatttttagtgttctgagaatgctttattgatattcctatgagagtttcattggttactgacgctgtgtactgattgggtaaattctagcatttttacactcctttgtttcaccctgtttgttcattcattcttccgttaaactaccattaagcaactaccatatctaattttaaggtggtggacaaagaatcaaacctaagttggggaatgtggcctctggtgattctcagttcttggtagccatgtctcagcatagtcttctcggacacctaatactactgacctgtataatcgatagggtattgcagacatcagagcatgtgacttacgaggctagaccataaaaatattgaggcttctgccttactgatgtggatcattcactctaggaaaagccagctgccatgttgggaggatactcaagcatacccgtgtagaagaactgagcctcctgccaacagccatgtgagtgaaccacgttcgaagttgattctgcagccctagttaagccttgaggtgattgcagcctttgctgcaatcttgactggaactttatttgagcccctatctagaaccaccgagctaagctgctcacaagtttctgcaccacagaaattcttgtgcgagataataaaagttaattattgtttcagcccacttagttttgggataatttgttatacaacagtggataactgcccattcaaagagtctaaaccattaactgttcagcattaggtaagaaaaccagttaattgttactttcttaccacctaccccagcaccccagcaccccagcaccccagcatgaccaccatttagagggagctgcgcttttgcaaaggtacataggacactgtctgttgcttctgtacctcttgcctcatcagttagtggtgtgatgtgtttgcctgacaaataccatctaggaccctggctgcatgagcttgttgagacagctaaattttacaggtagttggggtttcaccatttaacccagttaactcttctataagtgccgtattaaagcaggtggtgtattttgaaagacgtatgtaaaaacatttgtatttatttatatgaatgaatacattttatttatttatataaatacattatatttattcacataaacacattttatttatataaataaatccatttttatttatttatataagtaaataaattttcctataaataatctttctgattgacagatagcgaccttcctgctatgtccttacatgacagaggaagagatcatctttcttcagcctcttctgacaagtccaccagtctcattcatgagggttccactctcatgactgaagtacctcctaaaggctccccctcctaataatatcaccttggagattagggtttccaaatatgagtttggggggacacattgattccacaacactgaccttctatcagatcagccaggatgctctttttcaaacttctgtcaatctttccccaccttcacaatgtgcccctattattattaatatttaaaatattgaagatctaattaatgttgaaatttttctttaaatcaattcatagattcattaactttgttttaaaaggaaatgttctatttccatcgtaaagggaagatcaatatgatttgccacatatagatgaagataaacctatatacaaagaaaatagaactatagtaattccatgtagctattattaccagagaatactctaagcccaatgcttgtgttctctttgggcaaatggaagatgagccacttgtagagaggtattaaaaaccaaagcaagatcttttgcaagtagattaattgggcaagacaaagggaataataactatgtcaccaaaattatttaatgcagggtccaggagccaccttaatcatccataaattggttaggcatgtttattaccacagattggaagcaggcttcccccaagtgtgtttccctttgtaatgccagtgtcgtaacgccactatctatacttttcaacacaattccaagtgctacctctgcatggcagaaactatcaaccgtggatggtttctttttagcttgtccttcccgttctacagcatggaggttaagagctctggctttggttccaatcgtgtcccctttcctccctgtgtgttattgattgacctctctgagcccattgataaatggagttaaaaatttatactcactggggtggtgagaaggttaagggcaatgatgtatacaagacattagcatttgctataaggaggatgtatctcagttgccatatttgtatcactaaccatttgaagattttgtgttcaagatttggaagagaatcttcttcccaagccagcattttatattttgcattaaaaaaaaccacaaaagacaaaaaaaaaaaaaacaaaaaaccttcacagacaaaacccagggcatattttaggtgtgtttaattcgaagctcctgatgtctagcaggaacctggaacttccctttctatttttgtgggtcaatatattcccacttttgatttaaggtagtacaagttgtatatgggtgccagttagggattcctggctgatctgtgcaattttttcagtgaagttatatgtggtgcttagtggtgactatgggaagattacacggagaagtgttagaacagggtaatcaactgggaacccatttcaggtgaatgccaagatgttttgaaggtgggcatggcagggaaataacaggatgccatgcttggtgagaaatgaattcgtaagtgtgcactgtctgccataaagagccaggcaaggcacagaaaatattcttctgtttctttttctattctaccctctctctgctttttcttctctcactgctgctgaagcagtgagagcctgttgagttaaaataagccagtgaggattttggtggtgtttgcccttgaagcctcttgacatacagtgtcatcaaggagcagtgggtgagcctgcccatatctcgggcacaaacctaggtactcattgaatcctttaaactaaccctctaaagaattctcaatctgtggatgagaaatggcaacacagggatgttaaactgcatgcctacaatcatccatttggaagaagcagggctggaatttgaacatgagactgtatgctccctgttgtagtttcctatggctgctgtaaaaagttagcacaaatgcagaggcttaagacagcacaaatgtcttatcttacagttctgaaggtttcgctccagagtgagttttatggagtgaaaatcaaaatgttggcaggccttaggggagagtccattcctttcatcttccagtctctagaggctgctggcatttttcagctcacggccacagcactctaatctctgctttcactatcccttcttttttctgtgactctgaccttcttgcttccctcttacaatgacccttttaattgcattaggcccaccaggctcatccaggatgtatttgtctgtgttcacactagtgataaagacatacccaaaactgggtaatttatcaacaaaaagagatttgatggactcacagttccatgtggctagggtgggtgcacagtcatggcggaaggcaaaaggcacatctcacacggcagcagacgagagagagtgacagccaggtgaaggagtttcccgttataaaaacattagatctcatgagacttattcactaccatgagaacaatatgggagaaatcgatcctgtgattcaattatctcccaccagggtccctcccacaacatgtgggaattatgggagctacaattcaatatgagatttggatggggacacagccaaaccatatcacaggatagttccccatatcaaggtccttaacttaatcacacttgcatttgattttatcatgcaaggtagcatactcacaggtgggattaggacttagacaccttcagcaagaaacattactcagcccaacacactcctcaaacctaagcttattcccaatcacacagtcaggagaggatgcccacaatgcacttggggttttgtgtctgtgtctcccctccaagaacaggtacttgcccttgtctttggagctcacagccaagtcctacagtcagcatcagacggcttgtctcaagctgctgatttccgggagcaaagctgctgtgggacatgagactctttgaggcagaatacctctcatgcctggagagcattacaggctgcattagtctgttttcactctgctgataaagacatacccaagactgtgcaatttacaaaagaaagaggtttaatgaactcacatttccccatgtctggggaggcctcacaatcataatggaaggggaaaggcgcatctcacgtggtggcagagaacagaagagagcttgtgcagggaaactccgctttataataccatcagatctcatgagacttattcactatcatgagcatagcacaggaaagaccctcccccatgattcagttatctcctaccaggcccctcctacaacacgtaagaattatgggagctacaattcaagatgcgatttgggtggggacagagccaaaccatattacaggctaatgactgagcgggggctgtttcttgttgtgttcttataagaactattgcattttctttttcttccaaatatagttaatggcctcatcttttctggactaggtttgtagtagaccataagcaaaagagttcagaaagcacggcctccaagaagtcggatctgcttgtctttatcaatctgtttggattttcctggcccatttactcacaaatttaaaagacatgatgagttttcagggagaactctttagcatttacattttaatttagttttgtttacctgtttagtgccctctcggttcccagaccatcaaactcaccattgtcaccggggagaaatttgtgttggctgaaatctgtagtggttggtctgctgcttttctttctctgctcatctaccctgatagtttccctgtggtttgtggtgggctcacagctcttgacctcaggactctcgctggtctagaggagattggtttgtgggggcgtctgacatgtttgggttctttgtgacatctgggccacccggttgagtctgacaagaaacacttaatacctccttggctttgaagctctcctttgtggcactacaaggtcctctttgaaatcccacattcttttttggatttaggtattaaccccttggtgtgaggagaaagataattgtcaacacacttaggagagaaatcatgcagtaaagctgacccgacatagactaacttaaaactaactagttcattagtgctaacttagttcattagtgctttatctccttgtgtgtgtgagtgtgtgaggggatcaattatatacataagacaaagaccacctaggaaatgtttgagaaactgtgcagtgaggatgaatcaacaagtaaatatcatgagaatttcttagattgaagaaatattactcctatttggtgtcaactctgtgctggccttttcactgaagttctctgatgtaactgcccacagtaatcctgtaaggtatggctaatcatttccattttatagattaggaaaccaaggtcaaaagtggtgaattgatttgaccaaaatcacagacccaggaatttcctcagccaagagcatacagcagctgtgtcttaagactgtgccctttcatccaccctcttggtactcaaagcttggtccatgaaccagcagcttcagcatctgctgagagcttgctggaggtacagaatctcaggcctgactgaccccaggcctgctgagtctgaattttaaccagagtctcttggtgactcgtgtgtactttagaaggggaactgctcaccgcccccacttcccactgagtcgaatagacattaagtgagccttccttatgtgctcagcctgtggtgaggctgcaaagacaatacgacccagcccctgtaatgcaaaattcagagcatagggcagcacactgctgccatgagtcgaggtgacacagtactaacagtgggcacagggggctcggggcacagaggaggggtgcttcccagggagactgcccgttggagcttactcctaagctaattgggaggcaggaatccactgtggctgagaacagcagctctgaatttgcactgtctggtttcaagtccaaattctactacatcccagctgtgtattgtggggcaagttacttaacctctctggcctcagtatctgtatctgtaatatggggaatcataaaagcacctacttgttaaggcatattaaatgcaacgctactttgaaggactcatggtagttaacacccagtttggtaagtgttattattgaaggctgagaacagaacgacaaacaacaatcacaacaaaaggctggggaagattttcctggtggggggaccagatgagcaatagatctccatatgcagaggggtaactgagtacgactctgggacttacactagaacattcatattgcaataaagcagatttttcctgagcacctactctgtgccaaagcactattgtaggctgtggagatagggagctgaagtactgaaagcgttacagtcaagggccagaaaaccattgttcaagcagttggcgtatggcttgatctgtgtttattacaaagcgatacttttccttctaagtactgctttacctgcatcctgcaaattttggtatgttgtattttcattctcattaattcaaaatatgttccaatttcccatgtgatttcttcttcgaccctcacatgtttattacagcatttacttgtttctgttcatccagaactcattgaatacctgctatctaccaggcagtggcctggtcacatcttctgacctcaagtagtttatagtccaaaaagacattggctctttgggatagaggcactttttgggggagagaaacatgaatgcaattttttacatagagtatgaaactctgttccaaatctctcaaactcaggttctttgattcttaaggtatttttcactgccgagttgctgtcattgaaacaaaatctgtcctggtcaccactgtatgcccagcacctagtacagtgccctgaacatattaggtactcattaaatacttgttccacgaagttgttatttggtattcacgagttttgtctcaattccttttgattcttcttttcacccatctcatgttgacttaatttctccagcattcagttaagacctagccgaagcataattgtcagcatagtagagctggctctcctctttctaattgccctgcagagtttttggggagtctgtatgcaattgtgtacaccccaatgccccaaaaccctcttctatttcctttagcactcttgagctgaagaagccccactctccctctgccccacatctattgtgggctgggatacatgttgggcctctgcccagatcatgcttggagtggcaccagctgcgtaggatatgtgaaatatttgctcagagagatccagaagggttgatgtgagtaggatcagctggtgctccaggataaaaatcgtgtcaccacttttgccgaaaagtcactgtgtttctcctgtactcagcaggttacagggtgccatattgttctcagtcttccggctctaccctgttttgaagtgcggccgggtgttgttaaacggctccgccttcctgccagaatttctccgtggggaggagctgccacccagtccagtgagtatggccttttggtcagcattgcagaacctggcaagtcctaattccctgtgagcttgacacaggaggccgcctcctcctccaggcccacttggaggcattctgtcctcttgttggaagggaaattggtatggtagggaggtgcttcttctgggagtgggtttgtaaaattaagactgttttcatccaaaccagttacctgtttgtctagaacctgtgttctctgctttctgcctcttgtgttgacatttctcctttggccttcatctgttactcgctcacatgtgccgtgccccgggtgggtttggaagccatgctgctatggtttgattcctggctttccaacattacctttgataaccaagacaagtggcagtctaagcctcagtttcctcatctgcaaaatgggtgcaattctagtacctccttcctaaggctgtgaggattcaatgaggtactgcttgcaaagtttctagcacagtgtcttgaacacggtaaacaacttacctaggtctgatctcatttgatattgttgctcatagcaaaggtttgttgagtttactatggatataacacttgttcttttttaaaataacttttaaaaacgcaagtgttgaattatctgcattgtgcctttagggcatacacatctgcttacaatattttttgagctttcagaaaacttaagatatggttgagggatgcaggaaggaacaggacaagaacccagatccctgcccaacaggacagtggaagggaagtctcagcatctcgaaatgagtgcctggagaggatgggtggcggctgtgcggggatgtggtagggtgatggtccttgaaggatgctgcagatcacagtggccccacagtgtggggattggggtgggatatgtgacaacaaaggcatccctggcagaggatccagcacgagcaaaggcagaaagtccaggaagtgtcaggaatgagaagagcccagtagaggatgggcttagggacagtgatgagaccttctggtagaggcgttgaacactagggtgagggctttgctctgacttcaggaagcaggtgagaggccctgaaatttccacgtaagattcggggccgggcacggtggctcatacttataatcccagcactttgggaggctgaggcgggtggaccacctgaggtcaggagttcgagaccagcctggccaacatggtgaaaccccatctctactaaaagtacaaaaattagccaggtgtgatagcgggcgcctgtaatcctggctactcgggaggctgaggtgggagaattgcttgaacccgggaggcagacgttgcagtgagccgagattgtgccactgcactgcagcttgggaaacagagtgagactctgtctaaaaaaaaagaagagttggatcacagcaaaggtgagctttaatgagttcactctggcagttgtgccgaggagggactggcatggagagaaaacagaggcaaaaatcacaacctctgtcagagaactcatcgcactatttctgtcctgccctgggatggtggagcctaagggaacagagaggacagagtgggtggcacaggcattgcggaggcagaaatttacgtggcttccatgcccattggtgtgaggagtgaggggtgatcagggatcccagtggcttgaaagtataacaaaagtatgactagatccaggaaatacagctggagagacccaagtctgcacagaaaaggtttacagagcccaggcacacagatgacatgagcagttccaaaggagtgggacggggtgaatgatttgtggtcagaggtgtggtcacacataccgtcccctgatagtcggtgggaactgggtcaggttccatttgccaggggcaggacatactgcgtgccttggccttttctgggctactcaaaaaaggattccaccaggtaaacttgaatcacctagcgctggtagaaagccttgctcttcgtcatctctcctgtgtgtcgctagccttattaaaatgtgcagaggagaccgggcatggtagcacacttgtaatctcagcacttggagaggctgaggtgggagaattgcttgaggctatggcttcaaaaccagcctgggcaacacagcaagaccccacgtcttaaaaaaatttagccggctgtcgtgtctcctccgtgtagtcccagctattcaggcagctgaggcaggagggctgcttgagctcaggaggtggaggctgaagtgagctgtgattgtgctgttgcactccagcctgggcgacagagggagagcttgtctccttgtctctaaaaaagaaaaacatgctcagaggccttgtgagttagctctctccaaagtttttaagacaaggaattcagttaatcaagtttgttagacttgtttgaaaaaagggcctgaacaggctcagagcaagggcagatcaagctcttccacagattttaatgttcaggttttgtgacctttactttttttattttggcaaaatgtacacaacttagtatttatcattttaatttataagtgtaaaattcatagtcattaaatatattcacaatgttgtgtaaccatcagcattacctatacctaaaatattttcatcacatcttttaaaaaataactgccccttcctcacttccccaagcttgtggtctctggtaacccctactttactttctgcatctatgaaattgttttcaaggtcaatccatattgtagcatatatcaaaatttctttctttcttcctctccttccctccctccctccctccctccttctctctctcctttcctcccttccttccttccttctttccttccttccttccatttttgacagggtctcactctgttgcccaggctggggtgcagtggcacaatcaaagctcactgcagccttgacttcctgggcttcagtgatcctcccacctcagcctcccaaggagctagaggtgcatgccaccatgcctggctttttaaatttatttttattattatttttttatttttagtagagacagattttgccgtgttgccctggctgatcttgaactcctgtgctccggtcatccacccgcctgggcttcccaaagcgctgagatgactgcgccaccacacctgccacaaaatttctttgttatggctgaataatgtttctgtgtgagtgtgtgtgtgtctgtgtgtgtgtgtgtgtgtgtgtgtgtttgaataatactcctatgaacattgtaccaatatctattcagatctctgctttcgattcttctgcatgtatacctaggagtgaaattgctgcgtcgtttcgtatctgtgtgcttaaccttttgagaaactgccaaactgtcttcaacagcagccgcatcattttacattcccaccagcagtgcatcaggattctagttgctccacatctacccaatacttattttacttaaaaaaatagaatagccatctgagtgaagtgttacctccctgcagtgttgattcccatttccctaatgatgttaagcgtactttcacgtgcctactggccgtttgtgtatcttctttggagaaagtaacatccatttttgatactcacatggctttttggttctatttttgctttcttttggctaatgataaccttccagcaccacgagtttggactgtgctaatgtcttctagtactgtttagaagttgaggtaaaaagaaaacggtaattgaaagagacagttgttgtttacattggggaggttggtattccaccccctgtgctttttcattagctgtattgtattcttattatgtgttttaccgggtaattgtaattcttggctttggattttgtcccttttttaggctgcggggcgggggggtcggttattttataagcaaagaagtacagccagtatgattctgaagcaactaggtcacagtagaaaaaagttggagagtgaaatctcaagcaagccaaaaagtgatagatgagttaaaaaaaaaaaaaaaaaaaaagttgcctggcttggtgcagtggctcatgcatgtactcccagcactttgggaggctgaggtgggcggatcatctgaggtgaggagtttgagaccacactggccaacatgttgaaacccgctctctactaaaaatacaacaattagccaggtgtggtggcgcacgcctgtaatcccagctactcaccaggctgagagtggaaaatcacttgaacttgggaggcaaaggttgcagtgagcggagactgcgccgctgcactccagcctgggtgacacagtgagacttcatctcgaggaaaaaaaaaaaaaaaggctttggagcttcctaatttctaaatagatttcctttataattttcagaggttgtgaaattaactctgtagattggggagtgtagtttgtcactctaattgcccagcgttttaattatcggcgtgttttatgcttttgtgaaatgctcatttcacagcttgctggtgggtctttttgtggaacgagaaagtgaatattcacaccagaaatgaggtactgaccctgaagggctttccagtcaaagagaaaggagagcatgacccgccaatgccgttgtttgtaagcaggaagctgacgctgcgccatggtgtaggggaggaggacggtttccattctgttttgagcatcagaataaaaccaagcaccagaaggtgtggttcaaagatgctttcctttttcagtctctggtcaatttgttgttatttttcttcaagagagttgttggggttgggtaggcgcaggggccacaaggccatctttataaggctctggcatttgatagtgaggtattttggtattccaaataattggtggaaggatggaaaggttaaatggaaattatgtaagggctgcaaagagattcatatatgactatttcatgagtgcttactatataccaggcgctgttacagcccgtgtaatgccacctgggagttggggggagtcaccatcgtccatccgtctgtccatccatccatccatcctgcctccctccatcctttctctttttcacaatgtctcttgctccgccccctctcttcccctccttccttcctatccagtgcttgtaacctgtcaagcacatgttgtagccattggggacatcgtggtaaacaaagcaaagtccttgcttgcattctgtgacagatggagataaaatgggtaattaacaaatgtaatccctcccacccaccccccacattatttatttatttatttatttatttatttatttatttatttatttatttatttttaccatgtctgttactccatcagtcaggatccagttaggagacagaaactatatcataattttaacagggaagatttaatattaagaattattagctacaacagggttttggctactaaagggtaaagagaatcaggccgagcacagtgactcatgcctgtctgtaatcccagcactttggaaggccaaggtggaaggatcgcctgagtccaggagttcgagatcagtgtggacaacatagggaggtcctgtctctacaaaaaataaaaaataaaataaaaaaataaaaataaaaataaataaaaagtagttgggcgtgtgtggtggagcatgtgggggtcccagctacttggcaggctgaagcaggaggatcgcttgagctcaagaggttgaggctgctgtgagctatgatctcacctctgtactacagcctgggtgacagagtgagaccgtgtctttaagtaaaataaaataaaaaagagtaggtcgggcatggtgggtcatgcatgtaatcccagcactttgggaatacgaggtgggccaatcactgaggtcaggagttcgagaccagcctggccaacatggtgaaaccccgtctctactaaaaatacaaaagtgagtcggggttggtggtgtgctcctgtagttccagctacttgggaggctgaggcaggagaatcacttgaatccgggagccagcggttgcagtgagcttagattgcaccactgtactccagcctgggccatagagtgagactctgtctcaaacaaaaaaaaaatttaactctaaagaatccaagaatacagatttgggagcagccagtaccaatgggggatggggcagtacacccaggaaagagcaaatctggggtccccacgggccaggactgggatctggactgggccatggcccattggatggcagaaaggttctcactgaagcccccataaaggtgggactcactgggaaaccgctctctgtggtgccagggaaggacgtctgtgggaggtgcctaccaaggaagtctctggaaatcagcctgcaggggtggagtgccgggaaactcccgccccctccccccctccccgaagtgaaccgcccacagggagatgcccctatgggagcttcgcaccagaacccgtctgcgccagtgtccctgcagcgccctctactggcgaagctggacatggcgtccgctggcaaaggggaaactcttctttcctcccaagccgagcaatgctaaatgtgcctggtactgagacgtcatctgtggacggttggcaccgatgctaatcagtgctatgggaaaataggcagagcgaggagcgtaagaattattatgtgtgctgtttgatagagactgtacaaggaagacctctctaaaaaggtgacatttggagcagagacatgaaggaagggattgctggaggcagaacattctaggcagaaggaaccgcacgtgcaaaggccctcaggtcagccggcatggcatgcaagtaagccagctgcaacacagcaggtgtggatgaagggaagagaattagcatttggccagagcacgcattttaagggatggagatccatttggatagtcttgaacacagaactgaccggaactgacttactctttgaaaagatcgctctggctgctgtgttgagtggattggtaagggataggtggtgaagactgaaacagggtatccagttaggaagctatcacagtgatccaacccccagcttctgttgaggttgaagaacatgcatgcccaacctaaatatatgttcaaaggtggttattactgtttgaggtgatgaaagagttttggagatagaagtgatggttgttcaacatcatgagtgtaattaatgccacggaattgtatccttaaaaatgcttaaaatgcgctgggtgcggtggctcacgcctgtaatcccagcactttgggaggctgagatgggcggatcacttgaggtcaggagttcgagaccagcctggccagcatggtgaaaccccgtttctactagaaatacaaaaattgggcgggcattgtggtgggtgtctgtaatcccagctatttggaaggctgaagcaggagaattgcttgagcctaggaggtggaggttgcagtgagccaagattgtgccactgcacttcagcttgggcaacagagtaagactctgtctcacaataaataaataaataaataaataaataaataaataaataagagttggatcacagcaaaggtgagctttaacgagttcagtctagctctctcacaaaaaaaaagttaaaatgacaaattttgtgttacatacattgtactacaataaaaaccatttttttgaaaagaatagtacaaaaatgatacttccctctcagtgtattttaccaagggattattagtgtatatgtgtgttcttactggaaatgttaattggacctgtaattctttttttaacttttattttgggttcaggggtacatgtgcaggtttgttatataggtaacttcatgtcacaaaggtttgttgaacagattatttcatcacccaggtaataagccttgtatccaatagttatttttctgatcctctccttcctctctccctctaccctcaggcaggccccagtgtctgttgttctttctttgtgtccttgagttttcatcatttagcttccacttgtaagtgaggccatgcagtatttgattttctcttcctgcattagtttgctgaggataatggcttctagccccgtccgtgttctcgcagaagacatgatcgcattcttttatatggctgcatagtattccatggtgtatattcactactttttttttaatccaatctgtcatttgtggacatttaggttgattccagtagacgtgtaattcttcttggaaatgttaatcttgatcatttggttaatgtgatgacttctgggttctgcagtgtgaagttattatcttcccttttgtaggtaacaaatactttggaagagattaaacaaacaaataaaaaagtggtgattgttattaccagcatggctactactagctaattccaggcttcaagccactggggcataggcatatgtttagctcattccacaggaggggaacagaggctcaaagaacctaggtaagttggctaggcgcggtggctcacacctgtaatctcagcgctttgtggggcttaggcaggaggattgcttgagctcagaagtttgagaccagcctggacaacatagcgtgaacttgtatctacttaaagtaaaaatcaaaaaaataatggggtgcagtggtacatggctgtagtcccaattactcaggaggtggaggtgggaggattgcttgggcccaggaggctgaggctgcagaaagctgtcatcatgccgctgtgctccagcctgggcatcaaggtctgttttgcagaccttgtctccaaagcaaaacaaacaaacaaaagaaacaaacaaacaaacaaaaagaaattaggtaacttgctcagtggctagtgagtggctagattgtaagcttcatgagggcaggggactttgacgattttgtcggtatcctaagccgctagaacagtgcctaaacatttgttgggcagttaatatatatttgttctattaataagtagagcccgagtttgtgttctccgattccacaccccatgttccttctactacaacttctggctctggcttctggactgtcagtcattagcactccctatccctaaggtttcaggaatgttcagctgtttcctagcttggaatggaccatcctctggtcccacccatgggtaagtcattggctgcagagcgcagacatttggctcccctcgggacattcctccctcatttaaaacaatgaggcgggcagcagggtactttgtcccttgtgttagctgaagttggaggatgctgtgttgatgggaaaacgctgttactattcttagactagtggggctctcacttattcatagctccgcactcgtgggtggaatgagaagttataatagagtgcaggtgcctctcattgttttccgctactcactggatagtgtttattaaaaacgaaatcacagtggtgtgtctggagttgaagtctgaacaaataacccaaaatgaggagtccctggaaggtgggcaggaggcgacaaacaaagagaagcaaaaacaagtttgagctaattgggatcaggcagtactttgcatgtgagttctgaacagggagcttggctgcaaaacgattattgtatttaacttctgttggcatcattcgcatacttgtatgggagatccagaattggaatttaacacagttttcccaggcccttcatggaatttgaaaacatgactctgaaagcatgtggctgaaatgagactctttcacactgtttaaagatgcatgtgcatatgttggtgtccacacatcaacttaattttttcatgttccttgaaggaagcccgtctaggtccttctgaaagaagggctggagatttttattaaacattacttctaggctgggtgcagtgactcatccctgcaatcccagtactttgggaggccaaggcaggcagatcatgaggtcaggagatggagaccatcctggccaacatggtgaaaccctgtctctactcaaaatacaaaaattagctgggcgtggtagcaggcgcctgtaatcccagctactcaggaggctgaaaaaggagaatcgcttgaatcagggagtcggagttttcagtgagccgagatcgcgccactgcactccagtctggtgacagagcgagacaatgtctcaaaaaaaaagaaagagttctgaatgatgataggtgttggaatccacgttggtgtgtctcatgtcattttttcgggcagtttcttgacagacccattttgtgtgtgtgtgtgtgtgtgtgtgtgtgtgtgtgtgcgcgtgcgcacacgcatgagcctgtacgtgtccccctccccccccacacatatgcacataagatagcataaggtagttcctggcacatggcgttgttcttaaccatgaggtgctcccaggctccgggcagttccttgaaagactcattgtctgtgtggggggaggggaggctgtacatgtccccacccaacacacacacatacacacacatgggcacatatgatagcataaggcaattcctggcacatggcattgttctgaactgtgaggtgctcccaggagatcttgtgcttcctatcacatgcccattctgcaagtccatccccttattgagcagatgtttaccgcagagcactaagacagatggaacgtcaccgttgcccatagcactcatggacagcatggggtcccctgtagcagatatttgtggtgtatgctcgaagaggggctgcaggtagaactagaaaggtaggtaagttgggcagatggcgagagacatcacagccctcactcctgagggtggggagccatctcaggctcaggagaagaagagtgacagagtcaccaactcactccatcaaatgtggctgtatttttagaagtgtctggttcctgaaatacctcaattccttttgcctgcctggctcctctcctctcttctgcctgttcattgaactgaaagattatcaggactgtattcagcccggccaataatatcacaaaacaaaaatatcttgtgggtttgaaatttatgagtgttttgactgttcacagcaatgcctttgagaatcacagtgtgtcatcccctccccacccccacgaacatgtagtttttgggcaacttttcgatgagtaaaacagggcctgacttttaccccaaagtgatgttcttttgtggcttgtctactccaagaactgagatacccagactcatttctcatctcttgttgaaacagagaagtcactgtagcgccctccggggggtggggtatcaagggagagtatgggctttgaaactgctcatcccgtctacaaccttggagggcatggtgtttcactcccccacctctccccacaacttcaccctgctccaatgaggatgaaaatgtctttcttatagatgggacaggagccttagtaatatggtgcgagcaatggttcacataggggacaggtgttcattcaatggtgggtattattataataatcattagcatcattgctagtgactttatttttcctttagccaatggagcagtggcttttggcccactactttcgactgaatctatgagtgaatgtgatcctccgttttaaccctgtcttattggatgttggtaaacagtatatcatgagcccctgtaagagcttgaatccttcaaagacaaggtcagtcagtggccatcactactctaaacgtaagaccctgtgatgactgacacttactaggtttctcatttatttatttttctctgcaggacacagctatgtgttccaaagatggtcttaaacctataggagtataacaccatggctagttcagaaaaccttattccaacttccaaacttagaagatactgggaagtaaaagggagagaagggaatgcatggcttgggctaaaaaaatgattctgcattcatctcagaaggatgttttccagtctttctctagaaacaacttttgtgtctaaggattgtgggtgaacaacagcagcacaggctacattggcttggctcggtggttgggatggtttggctcttactgggcagtaagcacagtggctgggataggaccttggcatctcgtgcgaagcccctctgcctggagtcctgcctctgtgacacttgcttactgtgtgacctgggtcaactcatacctactgttcgtcagttttctcatctgtaaaatggggattccagtggttattatgagaattaaatatgacgatacataaatagcacctggaaaagtgtttaggaaaccttgacatgatgacctgtttagcagcagcagtgtgtgccatacttacctttatggaatgaacagatttggagtgaggatggatgtttagctcactttattagtctggtctcacactgctataaaaaactgcccgagattgggaaatttataaagaaaagaggtttaattgactcacaattctgcatggtcggggaagcctcagaaaacttacgatcatggtggaaaggaagctagtgcaccttacatggcggcaggcaagaggggcagggagggagagagaaagagggagggaggaaaccaccacatataaaaccatcagatcgcgtaagaactcgctatgtcaagaatagaatgggggaaccacccccatcatccagtcacctcctaccaggtctctcccctaacatgtggggattacagcttgtattacaattcgagatgagatttgggtggggacacagccaaaccataccactcatggcatctcgtttttacagagtatatgtgttttcagattttgcatgacattttaggataaatgtgatgaaaatgaggaaaattgggaatgaagtttaggtcagaaaagtttcagtgattattttttcagaatcattgtttcttggtttctagggtccaacatgccattgttcaatggctgtatttcaatggctgtatttcagaggctgtattttttttcccatctcttccttcctacttagaagacagtgacatttcctctgtgcctctcaggtgtcaatgccatccaacaggaatttgtacaaagaaagggaggactttctgatgatgttgtccaggacagtggccccatgtagctactgagcacttgaaacgtgactagtatgaccaggggctggacttttagtttaattttttgtaatttaaataatttaagtagctgatgtgtctagtggctgtcgtattggaaagcacagagtagacattgcaaatacagacgtagaaagacaccgtgcctgctgctaagaggcccctggtcctactgagtggtcagctgtttacactgacagtcccagcgtggtataataagcattaacacagagacatgtacagggtgctgagaaagctaatttttgcaatagtcaaaaaagacctcagggcagactccccagcacagagttccaagcctttacctaaaaaggtaatcattttataagtacctattatgtgccagatactaggataggcactttgcatagaaactcacatttcgactgggcctggtggctcacgcctgtaatcccagcactttgggaggccggggcaggcagatcatgaggtcaagagatcaagagcatcccggccagcatggtgaaaccctgtctgtacaaaaaatataaaaatgagctgggtgtggtggcacatacctgtagttccaactgctcagaatgctaaggtaggagaatcgcttgaacccaggaggtggaagttgtagtgagccaagatcgcatcactgcactccagcctgggtgacagagtgagactccatctgaaaaaaaaaaaaaaaaaaaagacatttacattttatctttactgtagctatggctgcctatcccaaggatgggaagtctgaagttcaaactggtgatgatccccaccccaagtcacacagttagctttatagttaaatcagggtgtgcctgatttcctagccataccaggcagcctatttcttgaataacctcccatcccctgtgtctcctttgtggagctcttggcaatactctggtgattggtaaccactgatacgccgccagcagtccacgcttgggtggaaggcaggtttcacgtaactgatttaccacttggtaaaggaacgaggtgacagcaagaccacaaactaataaatatgccggtattgacataatgtcggacctcagtatgattgatgcatgtgttgttgactgggatgtcacatgttcaggctgtaatcctggtctcagtatgactgtgaggacggggccaagtcatttcacaatttgggtgagtgttccaagcttctcagaagagcgacgcaatagaaattcaaggtatgaaattcaaggtgtggtctcagagtcattttatcttacagcttctctgctgtgttttctcagtatgtgaaatgggaacatcacttaccatctactcacctcctgtttgagttcaagggaaggtttgcagattggcctgaaggaagacttctcttgaaaaactcaaaccaaagagcacaccgccgtccccaaccctgagccatttctgtccttttcatggaaagggaactgtgttcgccagctcgtaaagccccggcgtctcctcctagaagaaacacccacattgacccagcagtgttcattttcccataaggtggtgctggatagggataggatgtcgccccttgttcaccccttggcaataatctgtttgattcactccaaatgctgcttctgatctccatctatttcaggggatgaccagtctgaataaaaccaatgagcttaatctacttgtggaatgttatagccggaagggattcatagagatcactctatcgcctaaaattctctcttctacatatctcagtgttggaaaacataaatgtgactccaacttgtcttttttgttgtttgtttttgagacagggtctttgtttcccaggctggagtgcagtggcatgatcttggctcagtacaacatctgcctccctggctcaagggatcctcccatctcagcctcctgagtagctgggactacaggtgcatgccaccacacctggctaacttttatttatttttagtagagaggcagttttgctgtgttgcccagactggtcttgaactcttgagctcaagaaatccttccacctcagcttgacattacaggtaagagccaccgtgtccggcccccctttcttcttttttaaagtggggtattaaggctcagaaaagagtgtttctgccactgcagaggattgctgacattattagttgctcactctgtccaaggcattgtgctcagctctttgtacagattgtttaaccctcacaagtctatgaatagagtatattacccacttcattttaagtaggaaattgaagctcagggaatcgtagcagagggccccagttcacactgctgatcagtgatgcgactgggatcaccacagcccatctggttcagaagcttgttctcctaaccaggatgtgagagacattcttgtcctaggcagcacgttggtggcagaggtgggatctagactgaggctctcattctgtaccctctctggccccaaggaaggaaaggggaaggagaagggcctttgggactgggtggatgtaacactttctgccacctctactcttcctgctatagattaaaacagaagctctgaattgcagccacaaatcaataatgaaaagctaccagaccaagccctttcttgtttagtgttgtgtcttctgtgtcaacatctctggaacatagtcaatggcagtacccagtagaagccatatggatactttttctcaagtgttgaaataaattaatggtgtggccatggttctcgtacttcaggtccctgtgagcccctggggtcctacacaacttggggtaatgctatggtcacctgcatcccctcctctccagccctcacctggttttctcttctccttccaagaaaaaacacccataccattcttaacatctctggaagctgggggtcaggagagggagatccataaagttcttgtcttccccgactcaagaagcttaagggtacattcactcactcatgaattgactggtttattcattcactggttgattaattcattcattcactggttaattaattaattcatgtcatcctttggatgtcttgcagagctgagtgctgaaataaaatgataaacaagtcaaaaacaaaaaggcctctgacttaacaggacttccgtgatgcgggggaagaagacaataggcaagtaagcaagtaaatatacaagataaatagaaactgtgatgagggagttaaagaaattaaactggtccttgtggaagcaacttcgggggaggaggaaagacagggaagaccattttaaggaggtgatgtttgaacttaagaatcaaaaacagtgcaagcgctgcatgggggagaacagtctaggcaaggtgaacggaagtgcagggtccctgaggcagaaaggagctcagcctctttgttagctagaacaagaaaggggcccgtatggctagcataggatgggataggggatcgtggtggataccagctaggatttcactgtaaaagaagaaaggaagccactgaagggcattaagcagggcagtgatgttttttaaagatctgtctggctgccttggggagcatgggttcagagagcagcagcagaagtgtgcaggatgacttggactgtcaccttggggccagcctgcagactggtgtggccgaaggagtgccgtgactcctctgccacctctccacatttggaagattgttttgcagctgcaacctcaaaacagaagcctcctaattaccaggtagctttctagagccaaacaaatgctgttgtttctgacaggtaaatcaagacagggaaatgatgacacattcaccacaactgaagtgttgatggggtgtgttgtgacccctggcttgttccaaagcctatgtgggtgggaattctttaatgtctgcctggaactgggcactcagctataaatagagctattttggaaattctgcacctcaatttctaaaaagttggaaggacaggaaaggggagctgtgtttgagatctcagaaatctgcaccccaccttgctatccaccactggtattccgtcagtcttactaccccctcccacctctagcccaccctctaccatcctcaccaggaaggaggctgcattcatttcaagaactgcttttcttttatcagctggcattactaggtatagacattatgaccctttaatgggcgatgggttaatacctgttgcttttgtgtgcttcctatttaaaacatgtttatctatcccccacccccactttatccaaaagttattcagtgttttacaaagacatgaatattgggccgggcttggtggctcatgcctctaatcctacctgaagcaagagaatcgcctgaacttgggaggtagaggatgcagtgagctgagatggcacccctgcactccagtctgggcaacagagcgaggctccatctcaaataaaattagtcagtcaaagacatgaatattttcttctaagtagaagtaatgatgacgatgatggtagcagttatgagcaggtaacatgcattgaacacttatttgctccatgcaatgttcacaggtctttacatgtaaaaacaaccctgtaaaataaataacattattctcttcattctccaagtaagctgaggcagaggattccagcacaagcaatttggttccaaaacctgcccttttaacctctaccagattttggtgaactctctgtctttggaagggtaggtggcggctgcggggagaaatagatgaagctgttacatttggcagcaaatgtaaatcaccaccttcactggctttaatttccccctccagccttctcgccttgccatcaccttcaccctgtccttcctcttcaggccacctatcccttccgattgaccccactggacttctctgctcctggcttctgtcttccctctagtgaccgctgtctttaccttcagctgcacgagctttttcaagaaccttcttgctccctctccatcctctctgttttcctacttttctttggccactgtttttgccacagcttctaggatttctctttcccacaatctaggagaaaggtagagctctcttatgctggggcaacgctaccaacattggtattccacagcattccaacgattctaaatactctcccagagtagggaggaaaaatcatccaaactacttggtaattgaattcaagagtgatggaccaaaaattattaatgcattcccttccgtccaccagccaaagaggattccatctttattctcctcccaaatgcaggctccattaaccttttacctttctttctttccggtctttcttttctatatctttttttttttttttttgcatttttccaattgtgatcatactatatatgcaatttgaggtatttcagacaacattattacatcattacagaagtctcatatgctgtattttataaatatgtgatgcaatcaatcattgataagatgtactgttattttatgtttcactaagagtgcgaagaacattgttaattatacaatgatccaaaaatgtcttctctctcagaatgtattgttttatatctattacaaaggctcttttgacttaggcatagatttctcatacatcaggccatttctatgcctgcctgtgaacacagggattttgaattacaatactgaatcctagtgtgatctttctgaagtcattttaattatcacttaaactcaatatggaaagcatcagcaatgcacctatatgcacaaaaatgagcagctatgatcaagttatcaggaaaaaccaaaacaaaacaaaagcacatctccatcatttataatggcccatcatttataatggctgcctgataattggagatacatgcaccagacttgacttaactgttctcttagtcatcagacatttagatttcaacaggctcctgttaagctctccttacagtgtgtgtggcactgtgcagttgaatgaaacatgccatggccagtggagacaggcttgggctgatggagagggcctacagggccaggccttgaaggggagggaaattgttagctacacgaccaagagacagaagagaggaaggagtttgtacccacaactcagctttattttatgtaagctctttctgcaaagggaaagtagctctttgtaccaaagcaagggcctctgaatgagagctgggagaggccagaatgggcctgtaagaggttgatgtgtatgagacctgaagccctatgcctttgggaaggagaggaaggagtaatatttgtgtggtacaaaggatgtgcctggcataccccatatcttttacaaagacataaatgtcttctgaataaaagtatgatgatgatgatcatggtgatgaagatgagggtgatgatgttgatgttgatgatgatggtgatggtgatgatggtagtatgataatgctgatggtggtgatggtgataggagggtgatggtgatgatgatggtgataagatgctgatggtggtgatgatgatggtgatatgacgctgatgatggtgatgacgatgataatggtgatgatggtgatgacgatggtgatgatgatgtcgataatgatggtgatgctggtgctgttggtgatggtgatgctggtgatgatgataatgatagtggtgataatgttggtgatggtgggatgatgttgatgttgatgataatgatgatgatagtgatgatgatatcaacagataccatgtactgagcacttactttgtaccatgcaatgcttatggttttttaaatgcatttacaccaaattcttataacaaccctataagtcagtgccattgcttttcccatgtaacgtgcacatcattcaatcactcaacccttgtcataggtagatactattatcctccttttatagatgaggaaaccttggcttagaagggataagctcaagttcacaggcagaaaagagacagccagtcaagccctgactccttttgtgaccctgatgagattacaggtcctcagtctcctcattgtatctgaagactaaagaatcagaaatctgtgactccacttagtttttctccacccaggagcccttaggccgctggtgagtgaagttcttacccattagggattattaatatactagataagagtacagtctctggagctaggcttgtgactttgaacaaattattttatctctctgagctcagtctcctcatctacaaagggggaattgataataggaattgtcgcaaagagctgttttaaagattaaatgagataatagatataaagcacttagaagagagtttggcatttgctaggctcacagtcagtgtcagtggttcccaatgttactgttttagctgcccccagtcaggtggttgatgagttggggagcctggtgggcagtctggaagagagcacagtgactgcaaggtcagctcctgaccttcataataaggactcacatgtgtcggtcccaaggatccccaagggatactcatggttgaaggtgtctatgtgttctccttggtgtccagcgaatgcctcttgacaatctgtggtcatactcacaacctatgaccacatacgaggaagcgaggtgtcccttttgcagttgttcagaaggtcccgtgggcaggagcagccagaggaacatgaaaccagctcgtaggtggtacttgtggcaacagcagttatagccaaggagaagttaaattctaaagacttgggcagtctccagggaatatactaactgagaaataacatccataaaaataattcaatactagtatgtaaaactaaaaacaataaccaagtgtgactggctgtctaagaattaagcaaagtaagatgaagtgtcttttgctagcaggcgctctcagcaaaggagataaggctgcagtaattctcttcccaccttcgatgggcaggtgcaacctttggctgcagaaattctcacttcccagcagcagctttgagcaccctgctctgaatgtttcttgggcagcagcagctagggaagaaactcagttaaggctgtttgaggacccaaggtggtctcactctgcaacacacatcggcagccagtggtgtgctggtaaatgattaacaactggctctctgaaaaacaaacaaacacattgtgcacctatacatgtacacacacagcttattatttattatttctctgaaatatgggtagcatataatttacaaataagaagaagaatagtatacacagtactgtttcttataaattcgagatagtcagtttttaccaaatgcttctgatttttgctgcgctattatatccattacaaaaccattgttgcagtataaaattgcagtatgtagctgtgacatgaatattggttgatattttcatttttattaagaagtaaggcaaaaacaaaataagacatatgtcagaacttcacttatccttctttgctgaattggataatggttttaaaataccaaaaaatatttcttcaatttttttctgctactcataatgtagcatctgtagagcgacacacttttgaatttgagttaatatttcttttttattttattttattttttgagatggagtctcattctgtcgcccaggctggagtgcagtggcgcgatctctgctcaccgcaacctccgcctcctgggttcaagcgattctcatggcttagcctcctgagtagctgggaatacaggcacccaccaccacgcctggctaattgtttttgaatttttagtagaggcgagattttcccgtgttggccaggctggttttgaactcctgccctccggtgatctgcctgtctccgcctcccaaagtgctgggattacaggcgtgagccaccgcgcctggcctgaattaatattttctaccccactttcttaagtcgagacaatcaataaagcaataaatgacacctggatttgtagcgaatgtctatttccatggtgtaaatagtggtaccctgagcaattttaagttataaatatgagatcactgaaagtggagttggggaacacgttattatatagtattttcaccacacacaggatacagtcaatgacttcaagagcataggtaacagtaaaatgtagtaaaacaatttagaagtcatgagttttgagtacttagtactttttagtatgatttatttaatagtaaccttatataatgtttttcttttaattgttttattgagatgtatttcatacactttccaataagcccatttgaagtgtaacattcaactttttttagtatattcgcatggttatgtaattttcatcaaaatctaattttagagtatctttttgtccccgtaaaagtaactctgtgcccatagttggcagtttgtcatatcactcaatcactgtttcctttaaagagcttatcattaaagacagcaggcagttacacaacatcttctacatgccaagaatgtttctaatacatgctttatggatttttaaattgtggtaagatttacataatgtaaaatttaccactttggggctgggcgtggtgactcacgcctgtaatcccaacactttgggaggctgaggtgggtggatcacttggggtgaagagttagagatgagcctgggcaacatgatgaaaccctgtctctactaaaaatacacaaattagccaggtgtggtgctgggtgcctgtaatcccaggtattcaggaggctgaggcaggagaatcgcttgaacctgggaggcggaggttgcagtgagccaagattgcaccactggactccagcctgggcgacagagtgagactgtgtctcaaaaacaaaaataaaacaaacaaaacaaaaaaagttcaccactttgaccattttaaagtgtaaaattcagtgacttttaatacgttcacaatatcgtgccacaatcagcagccatttcagaacatttttaccatcccccgctaaagaaacaccatatccattaagtggtcattccccatttcctccttcccccagcccctcataaccacatctactttgtgtctctatagatttgactattctggatatctcatataaatggaatcacacaatatgtggccttttgtgtctggcttcttgcttttagcatgctttcaaggttcatccatgttgtagaatgtatcagtacttcattctttttatggttgagtgatattctgttacatggatataccactttttgtttatccatttgccagtgggtggtcattgtgtttctacttgttggctgttacgaattatgctgctatgatcatacatgtactgtttttatgttttctgcaaactcctgttttccattcttgggcatattttggggagtggcattgctgggtaatatggcaattttatatttaactttcagaggagccaccaaattgttttccacggaggctgcaccattttatatttccacttgcagtatatgaaggttccaatttctccacatccttgccaacactttattttctgttttctttgaaggtatgaaattgtatcgtggttttgatttgcatttccctcatgattaatgatgttgagtatttttatgtggttattggttatttgtatcttttttaaaatagaaatgttgattcaagtcctttgcccagtttttaactgggtcatctggcttttgttgttgagttgtaaaagttgtttatatattttggatactagacccttatcgtataaatcctttgcaaacattttctctcaatctatgggtaggcttttttactctttttatagtgtcttttgatgaacaaagattttaaatcttgatgaagtcccctttatctattttggatgttgttgcttctgtttttggtgttgtatctaagaatccattgccaaatccaaggacataaacatttactcctgtggtgttatgatatatatagggttcctggctcataactctcatagcccttgttgcagtctattgttacaatattgcctgtgttaggcatcaggaaacagaatctctttgtctcctgtccttctttcacctgccccaaggcaggactctaatcttccccacctttttgattgtgagtcttcagaccctccccagagagtcagtcctgccttatgccctggggaaaggaatgctgacctcatgaagctcccataaaaacccaagagggctgggtttgggagcttccagatagctgaagacaaggaggttcctggagcgtggctgcctaggaagggctggaaagctccatgcccctaccccatacctcgccctatgtgtcttttcatctctgtccttagtactgtcctttataataaagcagtaaggggtagcaagtgttttcctgagttctgtcatctgctccagcaaattaatcaaacccaaagagggggttatgggaacttccacctgaagcccctcagccagacattctgaagtctctgacttgctattggtgtctgggggtatggggggcagtcttggggactgagcctccaacctccaactaactccacgtagacagtgtcaggattgaattggaggactcccagctgctgtcccctgcttagtatgtggggaaagttgagttgtaaaagttgtttatatattttggaaactagacccttatcatataaatgatttgcaaacattttctctcattctgtgggtagtctttttattcttttgatatcatctcgtgatgcacaaaagttttaacaacaaaagtttgggtgttgtatctaagaatccattgtcaaatccaaggtcatgaacgtttacctctgtggtgtcacccctcctctcgcatttggtgagaggagtcttctgtgttgattgtcatggtggtgtgagagcagaagggaaacatggtttcagaaaagagtttttccctgaaaccacccctctattttcttctcagacttttatagttttagcacttatgttaagacttttgatccattttacgtcaatttttctatatagtttaaggtaggcattcaactttgttcttttgaatgtgaatatccatttgtcccagaagcattgattaaaaaagataattctttctctattaaatggtctttgcacccttatcagagatcaattggccataaatgtaagtatttctttctggactctgaattatatcccattgatctgtatgcctgtccttatgccattgccacattgttttggttactgtactctgtgtaagttttgaaatttggaattgtgaattctccaactttgttcttcattttcaagattgttttgggtattctgggtcccttgtatttccatttgaattttaagatcaatataatttaaattttaatcatggcagtgttcaataactggcttgcatattttttgaacagtcatcagctcttgtgagccacggttggccagctcccaaacaccatgacatacaacttgcaggaaaagctcattttccagtttttccccctccagctgtaggggatatattttcgttaattcctgtgaccatatggcagcatggttaggatcttgggcttccaaatcagacagttgtaaacttaaactccaattctgccacttattgtgtcactttggacaagttacttcacctctccaagcctcagtttccctgactataaaatgctaacaatagttgttctttccttattggacactcaagaggattaaatattattcatgtaaggctcttagtataacaccttgcacataggaagcatttaatacctaaaatcgagtactgttattgtttcaggattattattttttttaaatttattttatttttttgggacagggtcttgctctgttgcccgggctggagtgcagtggtgcgatctcagctcactgcaacctgcttcctgggttcaggtgattgtcctgcctcagcctccctagtagctgggattacaggcgcacgccagcacgcctgactgatttctgtattttcagtagagatggggtttcatcatgttggccaggctgctctcaaactcctgacatcaagtgatttgcccgccccagcctcccaaagtgctgggattacaggtgtgagccaccgtgcccagctcagcattattatttttagtctacacacagtgaacttaaatctcctctagaaaagtcagaaggtctacctacaactttaagagttcagccaaaagagaccagtatctactaccgtggacaaccctatttaacatggaggagataagcagaaactgaaaagaggagcctgttttctctctggcagattaattttctttctttcttcacccatgccttggacatgaaacacaagtacaaaggttcagagaaaatcaaaacaagactgtggtttacaaataagtagtactagtaacatctcactgttggctgggcacagtgactcatgcctgtaaccctagcactttgggaggcagaagtgggaggatcacttaagcctagggttgaagaccagcctgggcaacatggtgaaacctcatttctacaaaaaatacaaaaattagccgggcgttttggtgcttgcttgtggtcccagctactcaggaggctgaggtgggaggatcacctgagcccaggagatggaggttgcagtgagccaagattacaccattgcactccaccctgggtgacagatccagaccctgtctcaaaaaaaaaaaaaaaaaaaaaaagtgaaaaaaaggaaaatcttcgttgttcttcatcagaagcctccacacagggcccctgaaggaagggcagggaagaagggggttggaggtcagtgggaggaataactctgtgactcagtgctttcctgactaccatctggatgtgggctgtatctgcgtaaggtgccgggacagggcggcctcatgaactcatgggaagcaaacacacaccctccctccgatccaccaggcactcgggtttcctgtgtgtctggtgatgtgctgggtgttgtggatctggactcaacggcagtctcaggtttatgtattaggaagcattcagcaggcaggagcagccgatctgagactggcatgggcagtggagacatcattcatctcctgaaacgtaatttggaggagactgttccagggctggctgagtgactccttgatgtcagcactttgccctgtcgtggtcttggcctttctcttgtgttccccagatgggtttcactgctctaaggatcataccttcgcaggccatctgaagttagtgaatctgaggcaaacagaagggctgggtgcggtggctcatacctgtaatcccagcactttgggataatgagatgggtggatcacctgaggtcagaagttcgagaccagcctggccaacatgatgaaaccccgtctctactaaaaatgcaaaaaattagctgggatttggtggcgcctgcctataattgcagctacttggaaggctgaggcgggagaatcacttgaaccggagaggcagaggttgcagtgagccgagatcgcgccactgcactgcagcctgggcgacagtgaaacttttgtctcaaaaacaacaacaacaacaacaacaaacaaacaagaaacaaaaaatacatagaagaggccttctcttcacaagtttttcttattgttttttgtttttttaagggaggaaatttctttcagaagtcagtactggacattcccttatttcaccttgagctacacatcccatagtcagcttagccctgtccctggtgcgggggagcaggacggttgcctgtatcccttagtcattgccgcaggcttgctgcatcacaaaccaccattagacctcagtggcccgcagcaataaacattcgattctcgccatctctgggtttgaggtgaccttggctaagctcccctgcattgctctgctcatctttctcacgagtctggcaatggggctgggaatgggctgatctaggctggacttggctggagtaacccagccccaccttggatctctctcctctacttcccacatgtatccttttcatggttaaaggtagaaacagaaaaaaacaggcagaaacataaaaagctcggagatggcttcctattgcttcttcattctgggccagagcaaatcatatggtcgtactccagggtgaggaagtatgtcccacttacagactgaaaaggtgctgcaagtctgcacggcagagggcatggataaggggttcgtaaaaacttagggccatttaatacaaatttgtcacatcacactggcttggattgattttgattcattgctctgtcgcccaaacagaattataattattttagtaaggaaagaggaaggatacctttggggcagacaatggatagagcttactatacaagtctatagaggcatctcacctgtagaaatcttaagatgagggttagccaaagcaaagagtggttcagggtgggaaagccaaggaaggccaggatcctcaccaagattgccagcagggagctctgattgtccacagctctgctctctgctcaccccggggatttagcagtaacagaatccacactagaaggacagagtgctgtacagacagaaggaaagacgcagacccaaaccttgataaccatggcaatgcaataggaaatctctttatttcgttggtgctcaagtgataccattaagtcccttaagatgcggaatttccttgcccccgctgccccctttctttctttcatcttatctatatatctgtatctatatctaatctattttttgagaaaggctctcactctgttgctcaggctggagtgaagtgatgcaatctcaggtcactgcaactgctgtctcatgggatcaagtgatcttcacacctcagcctcccaagtaactgggaccacaatgcccagctaatttttatatttttttgtagagacggtgttttgccatgttgcactggctggtctggaactcctgggctcaggagatctgcctgcctcagcctcccagagtgctgggattccaggcgtgagtcaccatgccaggcccctgcctctgtttaaatgctcaaacttggtatggaactgcacagactatacggctgctctccactcaagaatacaaattgaacattgactttcctcattttttatccagttttgctttccagagacccagatatggcttcattttttaaatgaaattttgcaggtcattagctcataatgattaaatgattctggttattagcataaaacacagctgtagtacataagaggtaacctttattgtttaaatattattcaatgtgcctacatagcacacagcaaaaaaaactttttttcagactattcagccattatggaaataacttataattacattcagaaatgttgcaaatgcaactcatccttgcagtgggataaacattgcctagaagggtttgaagaggaatccaggttagaaacaatgaaaatttttggctgggcaaggtggctcacgtctgtaatcccagcacgttgggaggccgaggcaggagaatcatttgagggcaggagttcaagacctcctcatctctacaaaaaataaaatatttgaaaaaaaaaagtgaaatttttgatatagaagaggatgtagggcaggtagggctcagaaagacccatgccatatagcaaagttcttagtaacacaggctttgggttacagcaggctagattcaaatcctgctgtggtcagaatgtctgtgtcaccccagcattcatttgttaggagatggggtcttttgggagatgatttggacatgaagacagagcctgcataattgcatgagtgcccttataaaagtgaccccagaagctgccttgcttcttccaccatgtgagaaaacagcaagaagaatatccatgaatctatgaggaggcgggactctggccagacattgaatttgctgcttccttgatcttggacttcccagcttccagaaccatgagaaataaatttctttttttcaaagctccccaggagtctctctcggtctgttctggctcaggaagctgccttatttgtaacaaacaaataaacaaaaaacaaaataaataaaagctacccagcttagattattttgtcataaaagccccaaaagactatgacaaatccttccatctatgtgtccttaggcaaaatacccaaactctctgaataccaattttctcatccaaaaaaatgggtgaataatatctaagaggtaataaccctaatacctcttagtgttgctgtgagaattaactaaagtaccatcttcatgtggtcagcacaatggctgacacatagcaagaccttggtaagttatagctgttgctgtcattcctgcagctgttatctttgtcattacgcttactgttattattagctctgctatcagagtgatgctgtggctggagaagatggagacccatgtgttcaggctgtgagcataggcagatcctttctaatgcagaaggtgcagacacagggcacagaactgccaactgtggctgctgacacctgtctgactttgactgggttagtgacaaagaaatgacttgccttttgtatgttagccctgtgcctggcatactgcaaatatctatggttgataaattaatgttatcatcatcacgtaagcatcttgggaagtctgtaagtaatgggagttggaggcttaacactgatctttgagctggcgatttttccagccaactcattttggacgttggtgcttaagcatatcctgttttcgagggtggtgttggtggtggaggaggtgatggtgatgatattgataatgacagcaagaatgtcttacatttatagagtgttcaaaaggtgccagatattgtgctaagtgctttgcgggcattatgttattcacacttcacagatattctctttctacatgtaaggaaaaaaaggcataaatactttatataatttactcaggattttaagtagagggtagattttaagtccaggcagtccaaccccctgaaagctgactctttaacaccatatgcttctgtcttcctggctgttttgtgaatgagtaggatggaaaggagatccttgaattgggaaggctacccatggactacaactagtacttgtcttcaacctccatctagatggagtgctcacaagatcctctacatcaaacctggcttcttagtccactgctgagtcttcccaattctgaaaaaaaggattcagggtataatttctcacacagatttctgggacagtgctttcttggagcaccacgcctcactaatggaacactcatgtataattctggcttttgaatttttatttttttattaacatacacagtcagcattgggtgtggctctggggattcattctagtgggcaagtctcatatttctcaacctcaggtttttcatctgtaaatggggacaatactgacatctagctaatgtccttgaggatggaatgagatattgagtataaagtatctagtagagtggctagcgtatagtgagtacccaataaatgcaatagatgttggcttttattactgtcaagtggaaacaaaagtataaggtttaagtaagcgaacgaaatggaagataattgaggaagaaaatcagatgatgtctaagataaggcaaagaacattttgtgaatgtttaaatatcctaagacccactaaggaagtttgtggcaatatttgctcaaagacagtatatataataaatactttagactggctaagagaatggctctgaatgtctacctagctatcacatttagaaacgccccttgccttccttccaggactttcttccttaatcaggattgacttaactgttaactcctagaactgtcgttgattgcttgctgaagtaacaattagtatagacattcagcaactggcctcccatactgtgattcactgacccagactttgacatcttgggctcagccataccctggagcctccaaatcctctgctggatcctttaagtccagacatctgacaggggaagaaaaagtacaagtttccaaggagttattataggtcaagcctggaagcagtgaggtcacttccacctgcttcccattggccagaattcagtcacatgatcacaaccaactgcaagggattctgggaaatgtagtctggtgatgcctcgaggaggcaagagaaatgttttcagtgaacacattgccttctcaggcttgctttctattgtagattgcttacaatattgcttttaaattgcatggtcttgtacaaatgatacgagttttattttgccttttggaaggagttattgtccatatttgttagagatatatctgtttatcagcatcattgcaaagtattagaaagggccctgcctgggctaggagccagaagcattcttcagttcccaacggccatccagccactcattgctgtgtgagctctggctggtcagtaagaacctttgatcccatgtttctttatcttcttctttttttttttttttttagccatagtctcactctgtcacctaggctggagtgcagtggtgcgatctcggctcactgcaaattctgcctgctaagatcaactgattctcctgcctcagccttccaagtagctgggattataggcatgagccaccatgcctggctaatttttgtatttttagtagtgccggggtttcaccatgttggccagtctggtctggaacacctgatctcaagtgatccacccacctcagcctcctaaagtgttggggttgcaggcgtgagccactgtgctgggccccaactttctttatcaatagaagtggggaaatcgtacctgccctgtctgcctcattggatgtggaagaaatgacataatccatgagagtggcttctgaatgaagagaacctgctaaagggaagacatgatctcaagtcagccacctctgacccaaataagaacacataattacaagactgtattgtataatcatgcaggacacaaggtatgcaattttaagggtcaaagtggtaaaaaaaaaaaaaaaaaaaaaaggaaaatcaaatataaaaaggcagccccgacaggtacgagcttgtagtcatttccccaaatgcctaaagtagacccattcccattgctctaatttgtagagatgttctcgaggcagcctggagtcaagacaagagtgccagccaggattgaggcactgttccaactccagtctggctgctttttcaacctggggctttagtcatgtcaatattcctgagcttccatgtgcttatttgaaaaataggaagattcgtccagtctcaaggaactatgataagtagcaaacaatatcccagaaaaatctccaggcaaaaatccactggaggccaggtgcgttaggtcatgcctgtaatcccagcactttgggaggtcgaggcaggaggatctcttgaggctaggagctcgagaacagtctgggcaacatagcaagtctctgtctctacaaaaaatacaaaaattagctgcgcgtggtggcgcgtgcctgtagtcctagctactcaagaggctgacatgggaggattgattgagcccaagaggtcaagacggtagtgagtcatggtcacaccactgccctcaaccctgggtgacagggtgagaccctgtctctaaaaacaaaagcaaagtctactaaaaattcactggagctatgagaaatcttagcccatggaatccagtcttctccttttgtttctggggaagctgaggttcagagagatggggtagcttgctcatgttatatagggagcaaaggacagagcttggaccagagcgcagaggtcatgataccaaagccacggcacctttgccacaacgtgagcaagaaaggatagccttgttatttttaatccaaactgaagttatgctttgggcttccagaatctgggtcaaaaagagtagaagtcaggctcagattgacgcttttcaagagagagaaaaaaaaagaaaaaaatcttgcctttccctagctagaggtcagatgtcaaaaaagctaataacacaacccaaggatgtcatcgacaaatgaaaaaactggtgcgatgcgggaacaaaagctattttatcattaatatgccgcttttttgttatgtactcatgccccagaaattattgtacagcctgtacttgagtccttagacagaaagcatcttatcattcacaagcttagctatgcaatatattcctccctccccccaaggtagttgttgttgggttttttttttttttttaagagatttacagtgatctttccatataggtttttctcgaaacatatatatttttaatttctcaccatctcaggggtaaataaatatattaaaataagctatgggatgtacagcagagtataacaatgataaatgatgttgtgtgtaatttttctactattaacataaagtaatataaactgaaggacactggtctattgagagacttagaagctaatgttccatatcagatgcggccaatgtcaggactgaatacagattaggcagtgtccttttctccccaggggaattaaagtttgagacaccacttgctgccagtggttttatggcattttgttggggccggtggtgcctttcttggtctattaattcaggagccgtaaacaacaatgtgagcaaaatgcttttccggtgggatgcatttcatttatatgtgcttgtatcgtctataccttgtcaatccattttgtcacaataagtgtttttaaattgtgtagattacctccacttcattatggttcctggcatttgtgtcttatgcaaggctattatgtgaagttaggaaatatttaaaactctgcctttctaaagaaacagggacacggtgcagaaaagttcatctggagttaggcttgtgtcttgccgtctctttaacggagagttcatgggcagggtacagtctgtgagaaggaatgaaaaccccagggtagatgctaacaaaaatcacttttaaaaaatgtatggtgtccatctgggttagcaaacacatgctcacacgtctgtgcttgctggatttttaagaacttaccagcatttaaggttttcttatgaaactgattttactcaccagggatagagtctcaaagttggaggtattttatgttgttttaaataatatcgtcatcacatgtcattttagaccccaaaagtccactccgaatctctgcgtatggaattgaggaggggtgaggctgtcagaagccgagggacttggccaaggtcacatggctttggacggccccctgaaccttggagctcatgttctgtggcactttgcatactgacctttctgctcttttatgctgcctgctctctaatattgtccaaaaaccttctctaaagaaagtacacaaatggagagagggggaattgggcatgccattgggagaacaaatttatttagatatctttggctgtgttgacagaagctgcccaattatacccaatatacaaattttaaatgcatattagtcaaagttccagttatgtagctttagaaaaatttctatgtgaatgactacttttccctgaaatacgtcctccatctcaggcactagttaggaacttcccccgcgtctggcattgcaggtctgaggttccgatgaactcttttttctctccttccccattaaaatgggcagaagggaaggaacacttgggtttcatcaagcacattgttatccttcgggttggctctgagatgatacgtttgtcacggttcataaattttatctttgcactaaaaacagggttagaatatcttcaatgcaattataaaaatgtattaaaactgagaaggagaaaaaatatggcggtagatgcgattttaatgattgtgtaaatgttcattgttccatggcaaaaaaaaaaagtcgagcttttcagccacagtatttcagacaaatgccagggcctgtttttctgtaaatgtgtaccgtgtgcttttaacacaaagacaaatatgttgctttaaaattccgcttggaatagagtgaccagctgtcgttatataatatctgcaggctatgattgtgtaggtgcctgtagtcactggctatgaaaatggccccaaataaagtggtatccacacttcttctttctcctacgaatttggaggtctaggaacgggggtaagcctatatggtcataattagcctgcaaacgtgaattaatatgcagaatctgtccccactgtgatagaatttgccattcgcttcctttgctaaatggcttgcagtggcagctgacggccaaaggggaagctgagaacagcaaagattcaactgaaaacattttagggggttcctgacttcaggcctcttttcagaatgagggaattgtctaaaatcccaaatgcattcttagctaaggtcagtgtgtctgggtctgtgtcaggcatgtagcagccacagcaaacttctcttgagatagcatctcctccccagcactcacttgacagattgtggtcagtcaacactcagtctgatagtttagaaagcttttgcaaggcattccccaatataaccattaagcatcaaactctcaaatggaagtttcgaaaaacagaaaaaaaaagtgagcataaatgcaaactatcaccccatgtaatagtttatttatttcatgctccacttttctgggcagttttgttgtcattctctctctacctctttttttttttttaaagacagagtctcactctgttgcccaggctggagtgcagtggtgcaatcttggctcactgcagcctccacctctgcctcccaggttcaagtgatactcatctcaagtggtttctacctcattaaaacaaacaaacaaacaccactcaccatttttgtggtgggcatggtggctcatgcctgtaatcccagctctttgggaggccaacgcaggtagatcccctgaggttgggagtttgagaccaccctggccaacatggtgaaatcccatctctactaaaaatacaaaaattagctgggtgtggtggcatgtgctataatcccagctactcaggaggctgaggcaggaaggtcacttgaacccaggaggtagaggttgcagtaagctgatatcatgtcaccgcactccaacctgggtgacaaggctagaccctatctcaaaaataaagaaacccttgctattttagcttccgatgaggatatttatccttctagcatttgaatgcagccaaagtccttactgggcaaatttttgagctctcaccccacattaacaatttctctccttaactttgtttctgaatgaagttatccacagagttttaaagtgagtggtgagttgtggatacctcttccgagcaggtgcacccccatcctgccattgtccctctccttagtgtatatggattgatgacatttcagtttcagacaaagggacatttcattttttttaggagattaaagctgtgtaagatatacaatttaaactgaatgttgatattttatagattgttgagtccgattgtcctgatctaaaattaactggttttgtgatttggtgtaaatcgcttaacctctttcaatgttttttcagcaaaatggggtaagaacagaatctgccttgcagagaattaaccgagatgatgtgtggaaagggcctatcccagaggctggtgtaccatggtggcttctcctggctctgctggttattattattagcattattgtcattgtgaaagtgacaaggaatgtgcctgtgcgtgaatctcactcttagatcagacgtgcttttgaaatatccagatatatacaacacaaagagcgaagtttgttttatattttgtttgtttaggttttttttttttttttttttttggctggtgtttactgaatgcgtgcaaggctttctgtcacaggctctgtgttaagatatttaacgggtgtttcattttcccagcaatgctataggacacagaaaggaacataaattgttacagagagaaagagggtaggtctgtgaatggaattgaacaggtaggttgaacaagataaatgccgaggaagcaagtgtatttaaataaacagttgtttatggaaggctttggaaatccactatattaatctggaattttatgaaattttaccagaacttaaattattaatagttgaggacaaagaccaaccattttccccaaaacttagtcactagttttgtccttaacaactaattaataaatatttgtgaatatagtgagtgactaaagtaatgcattaatggttgaatggctggccaccgtgcctcatgcctgtaatcccagcactttgagaggccaaggcaggcagattacttgaggtcaggagttcaagatcagcctgggcaatatggtgaagccccgtctctactaaaaatagagaagttagccaggtgtggtggtgggcgcctgtaatcccagctacatgggaggctgaagcaggagaattgcttgaacccaggagggacaggttgcagtgagacaagatgatgccattgcactccagcctgggtcacagagcaagacttcatctgaaaaaaaaaaaaaaaaaaaaaaaaaaacaacaaacagaaaaatgaacgagtgagtggcaagaaagatgaaatgattttcatcaccaggcctgccatggaattcatggtgccttgtactgtggccagtaggtgcaagagtatctagtaggtgctttatttttaaaaaatgtcttggaatcagtcatagtttaatatcaattatatataaattagtctttcaggatccaacagttctgatttattccactcacacaacaagtcagttcttaacacaaaccacataggttcttccttaaataaaaagctgtggctatgaagaagtgagagtttttttttttttcctctccaaaccaccacgtgctcttgtgtgttattgtagtggcttcgcagagtatttatttggccagaaagtctatagtcaaattgctcttcattctcaagtgtagtatttatttctccagctcatgcagaattctgttttatatggaggttttaaatttgtgcagaaaagtattacgtgggtttcaaaggtactcttttttcttttttgagacagggtctcgctgtgttgcccatgctggagtgcagtggtgcgatcacagctttctgcagcattgaccttgtgggctcaagcagtcgtcctgcctcagcctcccaagtagcttagaaccacaggcatataccaccatacctggacatgtttttaactttaatttttatttttgtagagatgtggtctccctatgttgcccaggttgctctcaaactcctaggctcaagcagtcttcccaccctggcctcccaaagtgcaggcattttaggcatgacccatcgtgtccagcctaaatggcattcttggaagtaaaaccacaggggatctgttggaagtggcatgatggaggaattttaaaagaattgaacaaataaaatagtcagagctcaaaaattgagtactgcttcgtttctcccaaataaccatcaccagacaaacaggtgtgtgtgtgggtgggggaggtggcctggtggtacttcatgatcttggaagaaggaaggcgcccctccttcttagctgattgatgatgagatagaaagatagaaacagccccatcactatgagatggaaacacttctttccttcatctgacttccctctccttcattcccaaccaagtttgaccccgccgcagtggagattgtggcagatgggtcagatagcatgtgtcctgtcgctgtcacaactttttaataagggctgggggtcctcttgaagagcccaggaactgcagtccctcctctatgccttcccctgaacacagtgcgccctcactaataaattctgagggctgacactgcctgagccggctggtctttgccctcaatttcattgagatgggccattgaaaactcattacaagctgtttagactctgactttgacttttgctcggcagcgaacaaaattaacagctcttggaggtaggaaaaaaggcgctcagccaaattaaaaaaaaaaaaaagaaagaaagaattgaaatgatgagaaaagacttttaatattaactccattagtcatgcaaacaagcgcacatgcgaagcgcatatgttctgcgtgtggctctcatttggagcctgatgagaactgtggtttctcccactggagggaaattcatacccaggtcttacacgtagctcaaaatgttttacatgtcaagcaatgagcctttgagtgtagcagaattgcttcataaatttaactatcactttcaaatttctgttttttttctaatttagtgcttgatagttttttatgtgataattttaaaatgctgtttgtagcaaaagttaccttgatagttcaggtgtgcagagaaaattcacagccatcaatagaaaagaaaaaaaaatcctgtttataccttaggcattctgtgatccttaggatgtagccatgacagtattacgggttttaaaagccacccaagtaatctaaatttcctccaaactaacaattcctgaaagattgaaatattgctaccaatgtctatggatggtttccattgatatttgggaagtttccatttgtatttgggaagctttgcatgagcaaaatgcccctttctcctgatatttgcaacccatcttaaaaataaaagtacttttctgcatgtggtcttgtacatgaaattaagaatatcactaccaaaatatcaaaatttaaggactagattgtgaaatgtttaaggaggcaaagaatatttaaccaagaaaggaaaagtgtatttgagagagacctgatgagttcaccactgcctctggagaatcaaatccaaaacagcatatatatgtatattttttagagacggagtctcaccctgtcgcccaggctcgagtgcagtggcgccatctcaggatctcggctcactgcaagctccgcctcccgggttcatgccattctcctgtctcagcctccggagtagctgggactacaggcacccgccacctcgcctggctaatttttttttttgtattgtttgtatttttcatatttttcgtagagtcagggtttcacagtgttatgcaggatggtctcgatttcctgacatcgtgatccgcccgcctcagcctcccaaagtgctgggattacaggcgtgagctgacgctcccggcctacagcatagatttgaggcatcttgaaggtagatgcagaagagtgggatctactttggatttttagattaatcactgttaagacttaaacagcttcttatttgggtgaaacatgggagtgtcaaaaataagtcactgtcactctttgccaacttcctttaactctttatacggctatatctccatagatatccagtttttgttttgtttttgtttctgttttcagttcctctccaaactgtcaaggacagtgccaagatctgcgaatatagaaagattaagagtttttttctgccttgttgggtcttctttctagcatgccaggaacatttttctcatcttttgaacattagggaataacacccaatgccaccctataatctcgagacagaagtggaggatcctcttaagacaagaaatctttcaaagccaaataatgaattaatccaaagccacttgaggctctagatagatcttagcagtcaaagcaataaatatataatcccataaatctaaactttgtggtatattcattaggctgtctgttttcttttctttcaaatgtttcacttaattccctgatataataaggcttccaaattcttggtgtttttctacaaccaagaccttgaactttttcctctcaggatttctttcatgagaacccattttctggccatttggatatcattgatgagggaattgaagcatttccctattctttagagtttcattaaagtttgactatattccagtaacaattgttgcataacaaaccacccccaaatttagtggcttaaaacaacaacatttattttgttcaggaatctgtagtttcagcagggctctgaggaacagcttgtctctgctccagcatcagctgaagcagcttgaaagccagggtctgagatcatctgaaggttgttcactcatgagtctgaggattgatgctgactggtgggtgggacccttgctggagggtctattggctggaacacctacacattgtctccatgtaccctgagcttcctcacaatatggcggctgggttccaagggtgagcgtcccaagagaaagaaccaagcagatgctgcattgccttttatggccttccatagaagttacatagccctaggttttcctgcattctattttttaggctgtcagacccaccccaaccaggtttgcagtgagaggaaatagaccccacctcttctggaagagaatgtgggactggacatactgccatggccacttttgaaagatgcagtctgccacataagcaaacagttcgtgtcctgcagtgggatattgggaaaagaatggtatttggcaaggggtcaggaaacctgcttttgaatcctacctctgcctcttactagccacatgactgggtcttagcatgctcatctatgaaatgggggacactaatgctgaccccacatttgtgctgaggattatgcaaataaaatctgtaatttgtgcaagcatccaccaagtgcctggtgcagactggatgctcaataagtctttggtgggtccatgtattgaattggaatctgcacattatggccattatttaggtttcttgtgtcctaatctatgtcactgagtacatccttgctgtttttcatgaattttccactgagtcgcaacatgccactggccagtgaaggtcaggcaggaaacagattaacaacatctcataccacaatgtcaaaatacttaaaagtgtttacagatgccagtgacacccagtgaatctaaaacaagaggaccagagcagaagtaaaactattcttgttcttctaagcttgaacacaggccttgatgttttatgattgttttaaggtccattaatcgctgaatcatgaggccatgtaaaaaaatgacagctataacatcaagggcccgggtttattttaaatgtttttgcttctacatggattctaattaacgacagtggctaaaacctgattcaaatgtggcaaatgtggagtgccatgggatgaagccagtcaatttcatctaggagcattttatggcttatggaaagaaatattctcttagattgaagggcgccagcctgtaatgggcatcagctgattctcagaaagaagaaacaacgtactgttacataattggggcttctccaaagtggcctgaccaaactgtagagctgcttgtttgtctgatacggtagccattagccacatgtggctatttaaactgaaatgaattaaagttgtataacatttgtaaaaatcacttcttcggtttcattaactagcctcatttcaagtgctcagtagctacatgtacctaacacattggacagcacggttacagaacgttttcatttcatcggacagtttaactgctttggagactggttctcctttttctttttccatgttcactccagaattaaagtcaaccagttcaaatgtcccatctttccccacagacatttgtgctcaaaggcatccccttccccatttggagactctcctagggcctaggcccaagcaaccaggactccctgtagtcaaccccactcctcaatttttggcacccatgttattccacctcaagatcatgtcctcttttaacccctctgaatatgctcctcctgtgatacccatagggaccctgaacctctagtcctcaagagcagtcattcacccctttggactatggatccgtttgcaacccaggaacaactactgtatggccacttcaaacctgtatatgctgcaagtattttattctaggtagggtaaataataggtcttagatataggtgcaaataattttcaaatatgggtaaatgctattgggatgtgtaaagtagaaatccattttaaagtgttattgaatccatactaacctgatcattacatatttactaattgatgattactaaaaatgtggacctttgtgaatttccgatgtcatagaagggtgttcttaactggaaaagtcagtagccaacattctgggaagtagaggcctcttcctcactgcttcattggtttaaaataaactccaacagaaaaacatgccatcatctttaatttcctgcatcagctaagcatttatttcatgtagtcctcacactagattgagtggttccatattaatatcctacgtcaaagatgagtaaattgagatgcgtaggttctaatttgcccagtgtcgtggtgtgtgatcttgaccactagcctaaactgctattttatgtccacccatcaacctctacggctgcccctcatttgaacacacaaaatatagttgtgtggcttggtggagccatctaaattccgttaggccatttgccaatgctgctattaggggcgaaatgtcatgcgcttgatctaaatgtacttaggagaattctcaggacctgatgaattattattcggaattttatggcctcacaggttgcaggcttcataccaactgcagctaatgagctatgggccccgagaaacactgaggacacacggcgttctgcacacagagtgggctgtttctgtctgttctccccctgcacccttctcagatgcaatctcaagtcataggagaacttgtgcaaatgtttctcctggatggtttcctttagagcatgtgtcctataacttgaaatggttgtctgagcagaatgtttttagaagttagatttttttaggggggaaacaggaaccaaagcaaagccaatagagatcttgaaaaaaaaaaaaaaaaagaaaaaaccaccgtggtattctaggaagaaaaaagcatttttcgaatgaaaactttttattatatttgatatattctgcttcccttccctagtatgtattaatgagatgaaatcacttcttaattttcaggttaatattaaagttgaagcccatccctctaccctgaggactctgccagcctctggcagtattcctttccaacttccacttgccccaaataggtagaagttagcctttatttttggtgtcatgtcttctttccctcctcctatcagtttttcagaaactccagaaatttaacctagtacacaggggccccccacccctgtttccagatgccttctagaaagaggactgggagtgtgaatgaggccatgtgggctttgtttgaccctgtggttgtcatgacaatttctcaaagcttagctgggacaggaagaaggaaggggaggatagcggtgtgttcagtgtgtgagctcctaaaagctcttgggtcactgttcccaggggatgatgaccctctatggcagatcagttgcatgtgcatatgagctttccctcctcccgtgggttagcatgttccacactcaccttctcaaagcaaagtctcccttaggggacccttggtatcctgttcatctggcaaatctcagcaccaatagaaacaccaagaacatggattcatcaaaggaaaaatgttgaagtttccatttttatgcttcctggtaatccttcagcccttgatggaaatttccagacctaaaccagtgaattaagagtatggggaagaggagccctcatacagttctgttaaatggtcctttaatattcttcttcagagtgacgggtaccccttgcctatacattttcaaaactacactgaaaatttcaaaacatttctatcagaacacagtcttattctcagctgatctgcaatttccacctggatctgttaaatggcagcttagctatgaaatatcatgttctgcccaatcacctaccctgcctcatatgatcagccggtatatttatgtggacacatgcagccacacttgtttttaacatttgagaatgacagcgtattggcagttcatataagctatcaaatattacatgtcaactcagaaaacatccctaggaagtattatgggaaccccctgtatcacttgagattcttggatccatatttgctgttaacaaaataaattaatagtcaacaactgattaaagcatttccctgctaccatgattgccttgacaaattctgcagtgctggagtattttacctcccattatttcttccgctgaacaggacgtttggttctaattgttaagcctgcctaatgctgattgaagcgggccatagtatcaagggtggaagaaggtgggaatataaactagatttgctcccttctgtaggaataactctatgaagactttctttttggagacaaatcatcttatgcaggggggaaaaaaaactccctaaaaaagacaaatgacagcgcaagatccaaaaagacaagtgctcagtcattttgtcataatgccagaagagacagtaatgctgtgtggactatgcattcagacatttagaaaatactgcaggcagagctggggattccgtggccagaagcatatttggtgaaccgaggacgcatcaaagagcttctctggtgtttagtaacttgcactgtatttcagaggtttataaagggaagggacaggaaagcagtgtgccagtaagacaactcctcttctcgtctggattttagaggaatgcagtgaacaaatgatgaaaaagtctgaagggactttggtaattcagtatccgaaaaacaatcagtgttttgtgacattcttagttgtgatctaccttatgttgtatacacatggtcactcacatacataggtgtattattctgcaattgctgagtaattgatgatccttcattctctctgtgattcataggctctctgggttggataaatcacttcggggaattatatctactagtatatttatgtcactagaattcctttgagaagctatcactgtgtacatttactgtatctattaactttcttcatctccctcttcctccctttcttcctttcctttccctttcctttctcctctcctgtcctttctctctccctccctctttcttttctttctttttcctttttctctctctctttccccctttttgtatttctaggagaaacggggtttcaccatgttggccaggctggtctcaagctcctgacctcaggtgatccacctgcctcagtctcccaaagtgctgggattacaggcatgagccatcatgcccagcccccttgtcctcttcttataaggctactaatcccctcatgaggggacccatcctcaagacttcatctaaacctaacaacctctccagggtcccacacccagataccatcccactgatggtcagggctttgacatatgaatgaggggtagagggacacaaacattcagtccctaacacttggtcaagttacttaagcttggtaagcctctctcttcttactgagtcatgagcataataagatatacctgttagggttcttttgaggaataaatggaatttttaaagaattgtgccagacatgtaataattacttgataaactatagctattataacaccatcaaagctgtggttcttaccctcatcattgtttaccctctcacacagtaagatctttctgaaaaggatcaagtctcattctcttttgaaccccaaagtccccagccaccacagagaccaaatacagtaggtaccaatgcatggcaatgcataggaactaggtgtcctaacttggcactgtatctgccaattttttaaaagacaagatgacatcccaaagattggggcatatttaggataatgccccattctgtgagggtggacattatagaggacatcagcagccagccacaggccatctcttggtgccattgggttttgagaccctcagggtgacaccgatttaacatgacaggtcttatgttcttgggtaatgtcaaacaacttcttgaaaatatttgttaaaaaaaacccaaaaacagaaacatatctgactgggcatggtggctcctgcctgtaatcctgacactttgggaggccgaggtggacggatcacctgaggtcaggagttcgagaccagcctggccaacatggcgaaactccttctctactaaaaataaaaaaaaaaaattgccaggcctaggcgcaggcacctgtaatcccagctgctcgggaggctgacgcgcgagaatcacttgaacccaggaggcgaaggttgcagtgagccaagatagtgccactgcactgcagcctgggtgacagaatgagactccatcctcccaccccctaaaaaaaaaatctatccaaaggccttgactaatgcagaatcagcactaatttacaagccccataaactaaagaccccatgtttgtgttataagttttcaaactttttaaatattttcccctgtcttattttctatcatttcacatcttcttaaacacatatatttttaaaagaggttttgactcactggtgaatttgtcttaaaatggaaaaataaaatcaaatataagaattttgttatgaatctttggggaaacacaattagggaatctaccttaataggtaaacccatgtaatttcttatttccgtctagttataggaaaatactgagatacttgtgagatgttttctttttttttttttccaacttgtatacacgttgttctataagtggttgattgttttttaggaaaaaaaaattcagcatctcaaatgtacctttaatattgcttctgatttttgttgttttgctatcatagcgttacctacctcacagagatgttttaggtcataagtatttttcatttaattttttttccccttaatttcctttttttccctcctaagctataaatatacagccttaaaaaaaacactcagaaatttaagtccaagaagcctgcttttcttgatacctttcaagtgctagattaataacatttttgtcaggtggttaccagaatggaggatacttgagctgagttttgctagagtccaagatcatctattctaatttctggggacacatattttgtcctggttagagagatatataatgatgcctatctgattctgtggtggtctggctttgatgtatgtatatgtgggcaggaatgtgtgtgcgtgtgtgtgtgcatgtgtgagctcctgtgtgtgtgttcatcacgtatccattgtgtctccaaggtcttatcaacagcaacaaaaggcctcctttgagatcaatcacattcattcgatgtttgttttctactacctgatacttactgctttctctttgtcgccgttaattttgtttgtcatatgtcagaccaggatgagtggggcacatacagattcagctcattttattttttttctcccttccttcgtcaccacctttgctaatttcaggcggtcagcacatttagcaagcatgtagctgcttgcctgagcaagccattaatctatattagaaaatgtagaggccccagtgttaaccttcctgaagcttgtctccccacccccaattctataggttctattatatctccgctggtttaaggcaactgctgtttcttttaggagttttcttttctttccttgctgaatatctgcacttaccaatactgcccaggcacatgggctgtggctcaagttttcagtgcaggacagtgtgtcattgcaggagaagacagaacccggccagatcctcccgctgccggcaagcggagtcagttactgggaagccataataattctgtcttctagagaattttggcaaaaatgtgcctccatcttacatcaacaatttttcatctttctggaatttttatttccccttcccctcttgttcctttttatcctcctggtgaagtatctccttttccctaaaaaactggaaaaaatgcacttttctatattaattcaaatcatattcaaaaaatactatatgttaaaaaatacgatgtttctgtaatccttacatcccctaataaaaccactgtgtgatgaaactaccaagaagcctctcttgaaaaaaaaaaaattaagtgaacctctactttagaatgttggcttttcatatatgtacaaaacaaaagaggttgcagtgatggcgtggataaaggcacctgtgtacttttccaacctatccaatttcaagatgtatcctttgtggattacattggttcttttctatggaatcatgcaccttagacctgggagaaaccagcgtgacatccagggtcaaggttttccaatcaggtattttgggggaaaaagttctgccttcatgtaacaactaatgtgacatggcagtgtataagacattacagccaaggccttctggttgaagttggggaactgtgggcgttgtccccactagtcctgtcatctgcccttgcaaaaccacccttgggctctctcgcgtgcggtctgtgcaccagctacctttgtgctccccacattcttccacctggcctggaagctgaccatagttggctctcttgccctttcttcttctggttggatttagcaatttaattttcaggcttgctccctgcagggtgtcacttcaccaccttcctctgtagaaggtttcgtccaggccgggcacagtggctcacgcctgtaatcccaacacttcgggaggccgaggtgggcagattgtctgaggtcaggagtttgaaaccagcctggccaacatagtgaaaacccatctctactaaaaatacaaaaattaaccaggcatggtggcacacacctgtaatcccagctacttgggaggttgagacaggagatttccttaagcctcggagatggaggttgcagtgagccaagattgtgccactgcactccagcctggctgagagaatgaaactctgtctcgagaaaaaaaaaaaaaaagaaggtttcatacattttagctgacaagggcaggagctgttcctgctgttactaactggagtacattgcatgaaaccttgctgtttccttaaaccctgcaccgacctttacaaacagtgcctttactaaacacttcttacgttacccgttttgagtgtaccatctgcctcttgccaggaccctgaccaagaatttgaaatctcagaccatgatgacctccttgcccaatgcgtaagctgtcctccaaaacacacatttatgggggcagagggagtctctctggaaggaaacttcgtctgagccatggctccttttgcttcccctgggttttaatccttccttcccttcctgttcttttaaggaaatctgaaaaggagcaaaagagctttagaactgcaatgcatctgtctgaggccaaggacagttgtacgcagacctctctgccagtgtttcagtgaccctcctcttgctgcttggctgcctatgagtccatgctgacatctggctctgtctgcccaaatataaacttgagagtgacttccaagatatatacagggctcagaggttctctccccaacccattcactggccctgctctctctcgatgttcccaagtctcctgggtgaccttgtgtgtccttcctgggatattgctcaatcaccctagaactgtaaggccaagtggtcatagccagaacatggcagaaacattcctgcttctattctgcttttctagcatggaatcccctctgccttaatgtgaataaatactccccaaaatgaaggcagaatccagtatctgttgtttaaactaaatccctaactggaccccctctgataaaccctctgataaagaattgatgtaaaatttgggacgctggataggaccaggaagccagagaaagagggcacccttttcttttctagcatttgagttcccaaagaagtaaaactctgtgaatgttcacttcattttttcctgatatatcgaggactccagatgtaacctcattgatagtcttggtgtgttcttcagtatttgtgcttttaatagatattgcaagtgtgtttaatgtgaaaatagaaatggagggcttttaaaagagcttactcaaaatcctgccaattactgaaatctaccagacaagaaggagccactcttttttttttttttttttttttttttttttgatacaatgaggggaaatgtttcttccacaaaagcctggccgtttgtctttaaaaattttcatcttttgggtactgagttgtaatagtaaatacagatgtagctgtgtcacattaaaagcacaaccaaattgtagtacaatgttcaggacacttttatgtcactttaaaatgtagagtatcatctaaaaatgagcaattgctgtgaagaaactggggttggctctgattttgtggctcagttttttttggtttcttgagaagatcatctttaagtcaaaagttatgcaatgccaagtactcatctgtgtaatctatttcagtttccaaaatttttcatcacctggttacaaacatctgaaggcaagaaatagccaagattccattgcaagtcccagagtaagttattattagacagaaacaaacaagtaaataccttgggcctgagctattgcccaaaccagtcctgacttggcttgggttctgaccaactgtttttgatcccacagtctgaagtacgtttgtggaaatacaaaggtcaaaccttcccctaaccctctgtaatccctggtggagctaaggaatgaaaagttgcttaaacattttcctgttgccagtttttcttaaacattagtgctattctttttttttttttttttttttttttttccttcttcaaccctgactctgattcacaaagaatagggaagcttagccaactgcagtttcaaagtattgcttcttaagcctgggccaagtgtgtagacttgatagaattctgattaatgcatcttattacattaattttagaagaaaccagaaggcatttctcctattcctagtgcaggccagcctgccagaagcatttgcctccttaaagagctaatatcttcagctaccaacaatcataaaactgaaagatctatcggaagagttggcttctctggatgtgcataaggcacactgcaaaatagatgtacagcttggctgaactttgcttcaaatttgccaatcaaaattcacgaacccatgccaagttggctacaaaacctctcgcttggagccagcactaattatgtcaacaagtagttcaagtttagcccctgttaagtcctgtactcctgggtattggggatgagtctttgtgtggtggcaaacgggccctgtcttcgcttggcttcctcctaaaattcccaggacctcttcgggtcccagccctttctcttcccctgagattgcgcctcctcaccctctgtcttggatggaaagagttccaaggcagtccagtcaccccagtgaaaagttttctgatgaggtcaagccttcttattgtcataggtcattttctttagaaatgagaaaccatctcattgggctttccaggaaggagactctgagtgcaagtttgttgtgaagaacacgtgccttggaattaacacctatggaagggaagaaaacgaagatggagtgggcagagggagaagctgactgagatggagtccagcaagggtctcagtcaaccttatgaagctaaaagggcccatcagagctaatccctattgggctaatgtggccaggcttttataaacctgccttgactcgtgattgggtgggctgccccaggaaggatgtgcccttgcagaaggtagtctctgtgttcaggtactccctggaaaggctaatggctgaaggctacaggttaccctggaagggagacctgggctgcacatcagagcccatctactttccagtgtggacaagttccagctcctgccccagccctgccacaccatcaccctctccagcacacacagcccttctctgttgattagggttggttgagctgttctaccaccttcattgactcaggccttgaagtgcagtagaaagccctaggacaaggcaggcccagttttgaggctgggtgcagaggctcatgcctgtaatcccagcacttcgggaggccacggcaagaggatcacttgaagccaggagtttgagatcagtctggccaacacagcgagacccaatctctccaaaaagtttaaaaatcggctgggcatggtggtacatgcctgtagtcctagctactcaggagactgaggcaggaggatcacttgagcctcgtaggtcgaggctgcagtgaactaagatgccacaggactatagcctgggcagttttgagtgctgcctctaccatgtaactagcttgccagtcaagtcattaactattcggggccttagtttcgtcttttctgaattggagccagtatacgtaattccaaaggttgcttttaagcgtaagtgagaatattggcagaaattcgttagcactgagagagggaatgtaaagtggaggttaagtgtacggcttaagagcagagtcaggaaacctagacttgcaccctgatttctgagttgaatgttccagggtaagccacttaatctctctaatcctcattgtgcttagctctagaatggaggcttgttgagaaaattaaatggaaacgataacggcgaagcacttagcacatgagcaggcccatagtactcaggtgttcattccacagaaaagcgttcactcttctgcactctttctcagtcagttggccactgctgttcagttcacttcttttggatcttctcagccccatcaggttcccaggtgaaatgagccccggctcagcaggccagttgtcttcagtgacccccagtgaggcagcaggtgggacttgattctggaggcaagactcaactccatagacagggcttacacaccggaccaaattgaggactagctaaaacagggatagggtgggtgcacctttccatgagctgtgtccgccagtgtgtcatgtcagtttacaatttccatggcaacacctagaagttactgcccctttccatgacaatgacccaacaacctggaagttaccaccctttttctagaaatttctgcataatccaccacttaatttgcatataattaaaaatgggtgtaaatgtgatggcagaactgcctcggaattgccactgtgggtactctgcatgtggggtagccctgttttgcaaggagcagcacctctgctcctgttgtacactgtcccttcaataaaagttgctaacaccaccaccttgcccttgaattctttcctgggcaaagccaagaaccctgttggcctaagccgcaattctggggttcgcctgccctgcatcaccagcacagtggaaggccacaagctcacagcattttcatccgtaaacaaagcttggcaatatctctgatggttaagagcttacgtgtttgcgccagtgagacttgcactcagtcttctttgagtgagacttgaactcgattctgagtctcctccttcctagatggactcattatttacttatttatgtattcactcatctattcattaatttatactcttagtttgatatcaacatctgtaaaatggggatggtaatgtggtgatatggaggaaaataaaataactctggcattgttcttactatttacctctgtactgtcatcgttatcattcctttgataaccgtgagcacctgtcatgggcctggcactctagtaggctctcaggatgcacaatgaccctgtccctgcttgctggagacataggagaagcccccagccactgacatctgggtgttgtaagaaagcaagaacagtcatggacactgctaagttttgatgccaaagagccaaatttgcagtaccagaatgtcctttccatgtgtgacccaaagttttggctactgaagacgttgcatgccctccaacagtggaagtggtgccctgaatacgccagaaataatcgtggagtcaacgaagatctgggagtattgtttggagacatctcagtattcctaattcattttcccatccttaaataaaaatctttcttactgatgatctgagaacttcttgtaagccccatttccatgagtagagttggccattgcccactaagaaaatttaggtggtttttattgggattagtggatgaacttaggattagtgtggcccttccttgaaatataatgacaaccttggtgaaagcaagaccacagggcctgtcttcagggaagtgccttgcattttaataccaaccatgccacgtgtatgtgtttcctgggcctgccataacaaattatcgcaaactgggtagattgagaatcattcattgtttcatggttttggtggccggaagtccaaaatcaaggcgtttgtggggttcgttccttctggaagctatgagggagaaaccatgccatgcctgtctcctggtttctggtgactgctggcaattcttgatgtcccttggcttggaaacaccacattctaatctctacttcctcccttacatcaccttctcctctggctttgtgtcctttctgtctcttacaaggacaccagtcattggacttaggacccacctaattgagtatgatctcatctcattccttatcttaattacatttgcaaagaccctgtttccaaataaagtcacattcgttggttctgagtgaacatgtttctagggggacactattgaacccactgcactgcatcaaacgtatgggtgtgctttctcttggcctttctcctatttgccttctctgtgttgggaattgtggcttcacacccatctacttatccctgcatgttgagcatcgtctgttacctgaagagcagaaggatgataaaagtgaggaaactgaggcacaggcttgccccaggttacacagctagttatgatggagggtgggtcggaagccaagcgccccccagcccccaccccacaacaggtgtatgtggcctctggtttatccttctttccccctgctcaccacatggcttctcattttgaaaacccggtggctaataaagtagatgagtttcaggattgcaaaatattgtgatcctggcctttgtccattgtgtaatcttcacagtgaccagagtgtttgcagttcctaggaagttcacccattcccaacagtgtcccagggtcaagctcagatgacctgtggtatttttatacccatatatgtgtcaatgtttataacttttaaagttgttttcaggaagcactgaggcatgtggtcgttcacaggtgacaaagacagaggctcagggaactcagttggttgctgagctttaaacccaagtctatttctgaggctggactgagtctttgagaaaatgcaaagtaacctagcatagtgtcagacacaaaatagtcagcaaataccatcgtagattcaggcttctgagtccaaagctaacaattctcatctccaattcccatcttcaaatattaaaataaactttttttttaagagacagaatctcactgtgttgctcaggctagagtgctgtggcatcttagctcacagcagcctcgacctaccaggctcaagcgatccttctgcctcagtctcctgagtaggtaggactataggcatgcaccaccatgcccagctatttttaaaatttcctgtagagatggggtctcagtgcattggccagactgacctaaactcctggctacaagtgatcctcttgccttggcctcccaaagtgctgggattacaggtgtgagccaccatgcccagccttaaataaactctttagtgtcaaaaaatctacgtgaggccaggtgtggtggcttacccctgtaatcacagcactttaggaggccaaggtgggtgggtcatctgaggtcaggagttcaagcccagcctggctgacatgacgaaacgccatctctactaaaaacacaaaaattagccaggtgtggtggcatgtgcctgtaatcttagctactcaagaggctgaggcaggagaatggcttgaacccaggaggcaggggttgcagtcagctgagactgcgccagtgtactccagcctgagagacagagccgagactctgtctcaaagaaaaacaaaaacaaaaacaaacaaaaatctacttgaaccaataaaaattcccatccccacctagaattctaaatattttataaataaagtcttcagagcctagatattcactagaacccagtggtcacgtgttcctaatgggtggaatattattttgaatctttccatgatgagagttacattgctgggtgaaagctttttatgcaacatcatcattgttgaataaacagacgcttagcatatttaggttggaatgcaagggaactaaaggtaggggagattcttaaggaagtctactttctcttcaagaatgctatcaaattgaaaggtaattcctaaagaagagtcatttgtaaattagggaggaagagctaaaaaagattcctagcaagaaacatcataaaggggcttgataaagccaaaaaactaaaagaaaaaaaaaaaggaattagaaacagagaaaagaggcttcgtgttgtttgtaaatttgtgaataaatctgttaaagaaatattggattcatattcaacttggaaaacagggaaaggccttttattgcatgctttgaagtttgaatacactttcagtagctcttcgttatctcaaattaaatcttaaattgagcttgtggttctgtgaattaatactccggcctttcagccctgctgctgaggtcattcaaatctaatggtggaaacggtcacagggtcaggccttggatggtgctgtatagaaatgccttaatgatgctggcagatgtttgcattctgcagctggggcggctggcgggttgggggctgcaggaagagaggagttgatgatcacattattgtgtcagccgcctgtgtgaataaggaaggacagactcccaccccatcccatcattccaggttcaataagaggcaggtgcttcctaaagcagaaaaatgtaagggaagtcatcatcgcttatcatcacctgaatgttcaccatggtgacccacatctcaggatgctgcaaaacgagagaggtcacctgtctgtgtaatcgcatatagcattctaaagatgttccattcattcagcaaatgtttaataaaggcttcatctgaagtttaatggacattgtttgataaaacagacccagtcactggtgtcagggagtttatataaaagtatacacgtatctgtgcaaatgtgtgcatttaaggcccgccgagcctgagctgatatgcatgtcttaactttgctgtttctctaaggggatggaaggattggctaccctgagctttctagacttgttatttttttttttttaagacagaatcttgttctgtctccgagctagagtacaatggtatgatcatagctcactacaacctccaatgcctgggtttaagtgatcctgccacctcagcctcccaagtagctaggactacaggcgagagccaccatactgggctaatttttgttttttattgagatggggtcttcctatgttgcccagcctggtctcaaacttctggcctcaaagcaatcctcctgccttgatagacgtgttcattgtaggtttctagcctctgaatccaaattttatttttctagtactttattttattttactttttattgattgaaaccttgaaataaagtttttaaaaatctatttgattttaaacgatctttagaaatatatgaaggttaaaaataactctcattttgctttttataaacagtccactcctacatgtagacacatttagatgcttcattttgcctgtagaaagtttttctaacaataaactgaccaatgatgatgaaatttttattgactcaaatgtgtgattggttgatttactgtattcagtccaagctcctcccaaaggttagctcattgactctacaactctgttttcctcattcattcattcctctaatcaatatgtattgctcacttggtacatgtcagatactttcctaggtgctggggagaaacaagcaaagtacttcagggcctgtattagtttgtttttcacgctgctgataaagacacacccgagactgggaagaaaaagaggtttaattggacttacagttccgcacggctggggaggcctcagaatcatggcaggaggtgaaaggcacttcttacacggcagcggcaagagaaaatgaggaagaagcgcacgtgagaacccctggtaaacccatcagatcttgtgacacttattcactatcacgaggatagcgcaggaaagaccggcccacatgattgagttacctcgccctgggtccctcccacaacatgtgggaattctgggagatacaattcaagttgagatttgggtggagacacacccaaagcatatcagggtcctaggcaactttgtgtgagaacagaacagagaggaagcgacacacctttcctttgggagcaatttttgggttgcttttgtttttatttgttgttttcattcctggtagtaatagtaacagtagaaaatggcagcgttatagccataaacaaagtgctctgtggtttctctctcaccatcccctaaaccctacaaggctaggggaaaatggtaatactcatgaacaactccacttcataaatgaggatgccggcactcggggaggtcaagtgagtttcataaggtcatagagcaaccaagtggcagggctgactcccacccaggtgtgttccatgggcagcgtcttcttactgcactgtcctgacttgctctagtgagatctaagagaggcacaatctgctttccttttgatggtgtgcagcagcatgatggccgcgcgaatttccaagaagaggatgttggtcgctgatggcatcttcaaagctgaacggaatcagtttcttactccggagctggctaaagacgcttctctgaagctcaggttcaagttacacccatcacgacagtaacaaatatcttagccaacagaacaaaaaatgttcctggtgagaacagccagggattctggaattgactgctgtagttcagaagagatttggcttcccacagggcattgtagagctttatgctgaaaaggtggccccagaggtctgtgtgccattgcccaggtcgagtctgcagtacaaactcctaggagggcttactgtgcggagggcctgcgatggtgggctgtggttcatcatgaataggggggccataggctgccaagctgtggtttctgggagactctgaggacagagggtcaaatccatgagtttgtggatggcctgatgatccccagcggagaccatgttaactagtacattgatgctgttgtgtgccatgtgctgctcagatagggttttctgggcatcaaggtgaaggtcatgctgccctgggaccccgctggtaagactggccctaagaagcctctgcctgaccacgtgagcatcatggaacccaaagatgaggtagtgcccaccactcccatctcagaacagaagggtgggaagccagagccgcctgctatgccccagccagtccccatagcataacgggctgtccttggcagttgtattcggagtctggatgttgctttgtaaagacatttaataaaatattgtacaaagacaaccgggaatgcctgtaatcccagcactgtgggagtcaagacaggccgatcacttgaggtcaagagttcaagaccagtctggccaacatggtgaaaccctgtctctactaaaaatacaaagattagcctggcgtgccctgtaatcacagctacttgggaggctgaggcaggagaatcgcttgaacccgggaggtggaggttgcagtgagccaagatcgtgccattgcactccagcctgggcaaaaagagtaaaactcagtctcaaaacaacagcaacagaaatgtattctctcacagttctggaggccagacattcagaatcaaggcagggctatacttactttggaggctctagctaagaatctgttccttgcatctttcgtttctggtggctgctcgtgattgtgggctgtgaccatatcactccaatccctgcctctgcagccacatggccttctcctcttctcctgtgttcctttcctgtctgcctcaaatctccctctacctttctgctatgaagacacttgtttttggatttagggtcttcctggctgatctcatgtcaagatccgtaacttaattacatctgcaaagacctgattcccaataagcttgccttcacaagttgcagggatttggatatggaactgcctttttggaggccaccattcaacccacaataagagcacagtggtgaggtttgaggggtggtatgaggtcacagtcacagccacccctctcaccagctgtgtgacaattctggatttacttagctgtcctctgcctccatctccctttccctgtaagtggaagtggtattcattgatcacacactacatgccggacaccaagctattacattttttgaatatgtttcttccttgcctcttgaggactaaccagccgggtttagattatttcctccccgtgtcgctttcctgcccccacatgttatagatggtgcaagggaaccagagagctttgatccctggtttctctggtcacaaacctgctctcctctccagaactccaggatgcctttctgtgggggctaaatcaaatttagctgttcccccaactgcaaagtacataggcatcaagtgaaagggtaaatgcatgaaaacctgaatggctgatcctctaagacagtgagagcagatgttaattgctcactgtccaagtgctgggctctgtgataagagcttcacgcagatgacatcaaagcaccatgtgtgggggaagcacgatgatcttgaccattttacagatgaggaaggtaaggctcggtgtcatcaactcacagaggaagtggagctggagtctctgtggctccagggtcaggtgtgtagtctcgaaggctgttttctgttctgcaagtttctccttaacacatttccagccccattttctggcagggagaccccaggactgaaaggagctggaagagtgaggtctaagagaaaaaggggctgggtgtggtagctcatgcctgtaatcccagcactttgggaggccaaggtgggtgggtcacctgaggtcaggacttcgagaccagcctggccaacatggtgaaaccccatctctactaaaaataaaaaaaaaaaaaaattagccaggcatggtggtgcatgtctgttatcccagctacttgggaggctaaggcaggagaatcacttgaatctgggaggcagcggttgcagtgagccgagatggcgccactgcactctagcctgggcggcaagcaagacaccatttcagagaaaaacaacaacaacaaaacatatggccagcagccagtgttgttatctcaggatgggaaccaggcactgcacctcctcattaggagtcagagtaagggggctaagctggttgacatgactggggacagagttgctgttgaaattgtcaggttatgaagggaaattagctgctgggtgtcaagaggtgcacattgctgcaggcattggcaactgggagccctggtgtgtctattagctcctcaggctgtgaggccttaatgacacccctgccaacattacaggaggcagcaagtgacagtaggaatgagagaggccagctaatctaatctgtacgccccacaggagttgggggctgaggacttcaagacctggcttctgctccctgtcacagtggcaaagacaatgacaataaaagcacagcctccagagagaagagccttcgatggacctgggtgttaatccaggggccaggcaaaaactgggggatgcagaataggaggttgggctggaggtgagtgagaagaacggatacggttaggaccaacatttaggcaatatgaccgtgtacaggattctaccaccatcgtcaccatcagtgttactgttccctgccatctgcctgtggggtgtctaccatctaaagtccagcactgcactgggcatttttaaattatcattagtatataattatatataataataatttaatttataactatatcatttattaaggtcctactatataccaaattctatcggacacatgtcctaataataaacgtgatataatctatcattatttacaaaacttcacactctgacctttattaattatgtgtgtgccaattatgtgcagggaactgtattaatcgtagttagcaatatcgtctctagtcctccaaccctataaagtgggcacaattattatttctctattgcaattgccatttagcctcagctggattggaaactatgtaatggagactctcaggccactgtcttttgagcagcattttctgcattgcattcttgtatgtaatcctaaaatgtagatgtagttttcccccttttagagataaggtaatcaaaacttatagaggttaaagggacttgccaaagcgacacagccatgaatggcaaagctaggatttaaacccttggacttcttctccttgccattccaccccatcataaattctaaacatcataagcagaaccatcataagtcagggtccatctggaagatggatggatggatggatggatggatggatggatggatggatggagagagagagagacagataggcagacagatagctagacagatggacagatagagatttttaggaactggcgaattggctcacacaattatggaagcccagaagtcccaagaagtgtagccagcaatctggagatccagaagggcccatggtagaaacctcatccaaaggcagaagacaagcatcccaggttgaagacagtcaggcaaagagagaaaattatttcttactcagacttttgttttattcgggccttcaacagattagatgagatccacccctacagggcagggcaatcagttttactcagtctactgattcaaaggttagtctcatgtagaatcaccctcacagacacacactcagaaataatggttagtcagatatctgggcactgtgtggcccagtcaagttgacacctacaattttttttttgccttctttttatttttggtgttgtcatcctgtgtccaaggcacatatagtcaatcatcacacctttcccttagcctgtactaggttctgtgccaaggattttagaaagtcatgtctcattcagttcccctaacaggtctaggagtcattatcttccccaacctaaggaaactgagacccagagattcagagtatcccaagatcctacaggaattgcagattgtagccaaaattggaactcctaattccagagctcctccctcctgctagcatttttctttgagtagttttattaatgagaaaagctgttgagcaccagagcaaccccgcctcttctaaataccatctgacatatacattcagcagaggaaaaatgatgtgaggtctggggcttgctttaaaatactttggggccagacacagtggctcacacctgtaagcccagtgctttgggagtctgaagtggtaggatcactagaggtcaggagttcaagaccagcctgggtaacatagtaacatagggagaccctcatctctataaaaaatttacatgaaaaaaaataaacaaaatacttctgcaacagcagcagcaagagctgccgcaatgaaagaagaaagaaaaggagggagaggatgaaggaaagaagcagtgttaacattctagtaatatttgcatctgaatgatatttatatggggttattgtcctccctttgtgtatgtttaaaattttcataataagcatatttatatatatacacataaaacatatatgtacatattatcataatgcctacctgctcttgagaaagtagtgccgtatggctgggggtttttctcactggtttctatggctctcccctcccccactttttctaagaagtggtagtacctatctgactattttcttggctgcctgaagaggcctcaaaattagagtaaacaaattacccattaccagggaagcctccttcctcccagcagattcccagcatcttctttcacctctaggagatattttccaaggtcactaaattaagccttcagacaatcgaaaaattgaatctcagtacctctattttcctaacaaaatttctgcagcaccgattggggctgacaggtacggccgtgcagctttctgggctgttcaggtcgatttggccaagcaggacggcatcagcttgtattggagggaacatctgagcagctcagggccccctgggagtcagagcgttccctccctccttgccactgtaaatgactatttctgtcgtttgcagagtgtccttttctttctcctacagccccatccttaccctctatagccatcaggtcaggtgcgtcttcttcatttatttatcaaaagggccatagcaatcattgcaaacatgtttaggaggatttggaaaccatgttcttttaaagggcactaatgatgcagcagtaatcacagtgctagtggaaggggagggcagaatgtgatgttttgggagtgaattctgtaagagaagaagggactgcgttcctagccctccagagcttgcagctatcacagcctggctggtggaggggcttgcagagctgagaaccactcagaatttgggggctgaagaccctggctgtctgagcaccatctctgtgactttcgaggtcatgttttccctccagccctcatttccccctttataagctgtgtcttagctagtgctttcagcaaagaatatctttaggctcctggaggattgatatcccctgaagtagcccctgaccagcctccaagatgtatcctaaaagctcctatggaagtttacatttcactcaaaatatctgtgttcatgtaaatgtaaaaatgatgtcttaagatgcttagcagtgaataaaatgggtgctctagggagatgcagtgagtttatcctgtggctttgagtatacactggtaccctacgtgggagaccccggtgcccatgcccgggtgcacaaagccagcatcagtgacctgcacaccaggaggcaggctgcatgatgattgggtgcaagtccttaggtgggtcactcagtctttcttttcttgagttttttcatctgtgaaagagtgatcataatactatttccattgagaagaagaaataatttatgtaaagcacaaagcataatccctggtattcaataagtactcagtaaatactagtgaaaataatgattataactatgacctccagaagcttttactgagcatctatctgtagcactgcatgtcaagccaagctagagtacagtctcttaggagacacaggggaggaaaacatccttggcaggttcgcatattggtgatctcgtcgtaattttctcaaatacccttcctctttcctcacttttggtgataactacctgtgttgctcttgtcacttttgcctggatccactaactcactacctaggtatctgcaacagttatccattgctgcctaacaaattaccccaaaatgtaagcacttagaatctcattgtctttgtgggtcaggaattagggagtggcttagctgggtgattctagctcagggtcttttctgaagttgccagcaagctgttggctggggctgcagtctcagaatccttgactgaaggggaggtttcgtgtccaaggggctcactgatgtggcttttagcaggaggcctcagttcttcaccatgggggcctctctgtacagcttcaggagcagcctcacaatatgtcatctggtctcccacagagtgatgatctcagagagagtgtgaggaagatgtggcatggccttttaagccccattcttagacatcatgcactgtcaagcaccgtaactttagctacattctattgattagaagaatactagtaaagaccatagttaggagaggggaacctggctccaccattggaagggaggtctatcaaagaacttgtgggcatattctaagaccaccacactctgccactccacacaccctgactctcctaacacctgctcgcttcactggttcggctattggcagtggcatggagtgtgggaaaatgcgtccctctctccttcctggattagaaaagtcatcatcctgctagtgtgaatccatgtcctgtggtggccctctcaggagggattgtgattaaagaatggacaacccaagggaatcatgtgtcatggtggagcatacaggccagcaggtgagttggggaggcgcctttacagaggaaaccttgagcttcttctgtgatattcattacagaacttcccccaaagacagatgacatccatttataattatttcaccagtgacttttgagctcatgcagttctatttatttttctctctgaaagtaagaaactttctttaaaggatttctgccatttggacaatgtgctatgtccccattggtgttaatcagttggtgggatatagaaaagcaaagtggccaggctcagccttttctctcgatctttttttttttttttttcctttcttaagaaagggtcttgctcttttgcccaggctgcagtgcagtggtacaatcagagatcactgcagcctccaactcctaggctcaagcgatcctccagcctctgcctgccaagtatctgggactacaagcatgcactcctgtgcttggttaattttgactatttttttgtagagatggggcttgcttgcttttttctccagtctggtcttgaactcctggcttcaagcagtcctctcacctcattctctcaaagcactgggatgacaagctctttctttataccagtcctcaacttgcactctttcctgcatacagcttgtttctctaatgtggctgttctcatgtttacttaatggcccagccatctcctcctcctcctcctcctcctcctcctgctttctattctccttcctcatcattgtcctcttctgcgagttcagaaaattgggttacaatacctacaacgtgcagtgaggacactcttttatcataaccccagtaggcttatggtgcttgtatctgatttttcatagtctttcgcttgttaatttactgcacatatgttcctttctcttgtgcattactgatgtgtttaagaatcttgaatatctatatggtgcttagagatttcacagcagttgattgaatgctgttacctcagcatcctctgtgaaactgggtatgactacacccattttgctgatgaggaaactgaggcataagaggatccgataaattacccagagtcacacagctcacaagcaagtgcaggcttccagccaaggtttgctggctcatgcgtttcatgccttctctatggtaccatacaggcactttgtctcccagtggaatataagttctttgaggccaaggactgtgtcttattctgtgttgcatccctttggcttcagcctcattgtcttgagtttattaagcatttggaacatttcagctgaatgagtgaatgagtgaatgagtgaagccatcagtcaaatcagaacactgctcacacatgcatcccaagtccagctgtcgaacgtctggaactgagcagtatggagcctgttaagaccagtgatgctgtggcctgaataacaacaggataggaacattcccttcttctcataaatcttgtaaatttgcattgtttgtgccgaacagggcccgtgtgttctgatagcaaacatggagaggcccaaaaggctgatctgggaccatgtccccattgaacactgctctgtgctgagtctgcagaatatttaaataaggggttaatttataaagtgagctacgggaaagtttccaggattgtcgtgcgtgtgtctcataaatcggcacaaattgaatctaggtttctaggtttctgtgcccctcagctcctaagtaaaccaaaatttattgagaggtgtataggttgccatccaaagaaacatagtaagtgagaaaagtgtatcctcaggaggtctgtaaacaaggtctgaaggctggcagaaaggaccagggtctgcaatgtagaatccccattgccgatgatcagaaagtacagcgtagtttgttgcagatgaagacagggttccaggaattcttgatctttcttgaacattccactgacttcttaacagaataaagattttgtatattgcagagataatttatagatacaggtacaaaggggatacagacaaagagaaaggctaacttcaggatgttgcgtatgtcaaatcattacattagtttacccagaaccaaaaaaattatgcaatatataaatatgaagctttagtttttcatgattgttcgtaatgacattattatgataatgactgtttgtaataatcatgcgtaccaccttagtctgagcaatcatattagcagttcgtaattattgaagggctgtcaggaaccagacactgtgctgagtgttctacaaactgtatttccagtcttcttttttgttcaatttccactcaaatttttaaaggggtttggagggcgttagtgtgcccattttacagaggtggaggaggaagctccaaaaatgaagcccaaggatcttaaggtaatatatgggcttgaatccagtgtatcttgctccgacagccttgcttttgtcattatccaacattagctgtctttattatagtggccttcttaccacctagaaaacaagtgccagcattctagtaaaatttattcaccttccgagattatttactattttagtctgtagcttttatccctttaactacaccattcaaagcgttgtgcaaaatattctagtagtaaatagaggctttaaatccacacgttgataatggtcaaatcctcttaaaggggccagcaacaaaaatgactttaaaggggaaatattccttcaatgttacaagcgcccatgagcatgttagtagagcagttgtgtgttgaagaaagagaaggtggagtgatactgaataccccgtaaaatcacacaatcagcacttaagaatgttcacacagttgttcacacacatattgatatcagaccttatagcagtcctattggctagatcagttattatgaatgtgttttatagagtaggaaacagagatgcgacgtgacttgcctaagaacacacagcagttctgaaactcaccctgtgctaatctgacctcgtgaagaaattgagcaaactaggctccagggagaaacgaaaacaataacaacaaaaaatgtattgccaaaaaattgctagcagacatctagaaaaatgtcttcaacttcttttggtaggaaaagaggaaaaattcaaatctgaattcaacatatttatttttttgtttctgactttttacgtaaacagagctctgagttgtatcctcagatatatttgagactaacaacaaggaaatataaaattatgttactacctaagctgccacttcttcaaagcctcgttattcttgttcccttcaatgtatttcaactccaaaatacatagtgacatgaaaattgtgtattcacattgttctattgatttcgttgagaaagtgaccttgtatgcacacatgagaatttagagatctatatataccgcctggcctcttctttgtaagggtataacagcagtggttaacatgcattttttttttttaacagttagatttactcttcctttgcacagactaatagcacactgaggtaggatccagggacggctccttggcaagttgtactgctgtggcctagggagggacaactggcagggccacacaaggaggtaaaaccttatgctccatttgcaaagccagtggccccagcagagataggaggccctctctgtgatttcggcagtggtttccctgggattgaggtctcctgaaacttattcccgcaaggacatactactgtggacccacctgaagggtggcatccactcttctagtaggatctcacattggtattttcagacacttctgccccttgccatgtttagtaagtcatctatgttgtttgggaggaaagagaatgagcattcctcagttcctgcactgcaccaggccttgccaatacagtacctcatttaattcttgctaccatccttgaggtggctggcattaggccatttgcggggtgtagaaaatgacatgcagaaatactgtagcagctcacttaatatcaggcagatggtaagtggcagagatgaggctggaccccaggatttctgacctaatttctgatctctttaattattctatacaccaaaagcccctgtggtttggattcctaatcacgggactgagatgaaacagaatctcttagcatagggggccaagcagtagatgggcttttgcgaagaagttttttcttttttcagagtcagaggttggcagcaaaatatgagagatggaaggtcaagtgcagcagaagagagaaacagggagagtggaggttgttctctagaacatagaagccgcttcttcatcccacacaatggaaaccagagcccagattatattaacaagaagttccagaattgcagatggccctttgctgcttagggaggggggagaagaagaaggagaaaaagaagaaaaagaaaaagagcaggtggaaacttaaaaaaatgtttagctgcatgtagatggcttttattataactgctaggctgaaccagaagacttgagctatgtaaaaatgtcacttgctcttatcacggttcatagagattacctttcaacgcgagtttcattttcatttcttccaacacttagagaagtgaacgaggcagtgactcctttattccctaaccctcacccagcaacttgctttttcctctgtgttttgtgtcattctgtgtgatattgcatcaaggcaattcacggcagtggttgaaccaaaagcaatttaagtcaaaaatggacaaatatggatgtcacttataaggcttgttcaaaggcctttgacatcactcaaagcctgaacacttctcaggagtgggatacttttttttattattattttttattttctagcagtgcaagattgaagatttaatacagacctcttaggcgtctgcgtggttcttacctagaaactgtttattggtgaaccaaatattttgtatcttataccaagaaagaggggctgacaaagattgagtgattagaaatccaagtgaatttctatttattattttgacttggtaatttgtaataacaatagccaccatctatctatacttcctagatttgggcatggtgttaggagtcttatatttattattttacttaattttcatagtcatcctgtgtagaaatatcaataaatataaaggtaagtattattgtccccattttacagatgagaaaatggagtcccagggacctacctgctcaagggcacagaaagcttgaatgagtaaatttactttgtgttgttccaaaggtttctccaaaggtctttgcacctcccaaggctattctcattttgagaaagactggcacagttagaggccaggaacccatcttggctgtgtgccttctgctttgtctctggggttgtggggaaggctggtagcttgagagcctcctccttcaactctgtcaggctgcatgcacattggaaggtagcttttcaggttgtggtgggtggtggtgaagcagagggatgcaaagcagggtacgtggagggctgtgccttggtcattcccaggaagcaaagcgagcgtcaaaaaaagacagggtagttgggccatggcgttgcagagtgacagtgaaccaggaaccagaagagctgacttcagaggaggctttaggcgctcctgcatgttgattcttagagaactaaagacacagttgcatcttaaaatgttgagacttacacgtatacacaataagaatattttctttggctgcaaatgtactataaaagagtgaaaaagccaatcccaaaagattacattggtaggattccatttacataatgttcttgaaattagaaaattataaaaatagaaaacagatggctgggcacggtggctcactcctgtaatcccagcactttgggaggccaaggcagatgggtcacctgaggtccggagttccagaccagcctgaccaatatagtgaaaccccatctctactaaaaatacaaaaagttagccgggcgtggtagcacacacctgtaatcccagcaactcgggaggctgagacaggagaattgcttgaacccgggagtcagaggttgcagtgagcccagatcgtgcccctgtactccagcctgggcaacagagtggtactccatctcaaaagagaagaaaagagaagaaaaggaaagacaacagataagtgattgccagggactggagaggagtggggggtgagtgggaaccagagtggatttaaaacagcaactggaggatcctggtatagatggaaatgttctgcatcttgactgtctcaatgtcaatttcctggttgtgaaatcgtactagagttttgtgagatatcacctatgggggaaactggatcaagggtgcatgagattgctgtattatttcttgactgcatgtgaatctacacttatctcaaaaataaaaactttcattaaaatcaaataactgcttaatattttgggggaaaaattcaacaagtaaattcaaatcacccacgagcccaccacccagagagagtcacctgctctattttgatatattttctcttcctcccttccagtctctctcttctgttcctagatataaaatggagaggttttaaaatgtaattacatctaactatcccctggcttggtaatatccaaccttttcatgtcctcagagaggtccaaaggctttgctgaaacttgttggtttggcattgattttgacaaaagacagcaacaagatcccctttctaggaacccatgtggattactatggattcagaatggatgcattttatgtacagggctgtgactttttctttccccttcctcatgctaataggtgttaatactttgcaataaatattacttatgtctatgaaatgaactgcatcccagcctgtcagcacatatttattttctcattttagtttctccaggttctcactgttatggagggtggggagggggtagaataaggttaggctggagggcatatctgatttggaaaatacatccctggtgatgttcctaccaagtcacaggcttggttggtgatgctaaattgggactgaggaatgggttaggagaaggcttgaagaacccacctcctaaaaccgtctcatcatcgtctagagatatttctccaagtgcttttgtttccagtgacctcccaaccccaggaactagcgaagccttcaggcaggtaagcgcacaaatcctgcattttctagttaaccatatattattagctagtgacttgagcaagttgcttcattttcctgatcctccattcccttttctgagccacagtttcttcgtctttgagtagagttaacaaattactgggtgtttgaaagatcaaatgagttagcacatgagaacatgctttgcacaaacaaagttgtatgcaaaataagttatcattatggcatgggagaaactgtttgtggacattgcctcccagttgaccctcagtgtgtacttgtggaataattttttaatataaaataattaccatcactaatcctaactgtgcacattcttgactctgtgacactgagcaaaatcctgaacctctctgtgccttgatttctttcacgtcttgttctagttttgaagagcgattcttgtgtgaattcagggagaggaggcatgaggcatggtaaggccactgtacgtctgtggttgacaaattcagtaggcccacagtcaatgcaaaagtcctcttgcctctgcagcacagttacaatgaagaggagcgatggcatggcatgatcccactacttagggaggctaattatgtagtgtctacagagccagtggtttattttgcattgtttatgtcagcattaagcagtattgttacacagtttgtaagtcttaaaactcagtatctactctagtagttgctccaaatgtgatgtcctcataaatcaccgagggatcttgttaaatttggattctgattcagtaggtctaggtggggcccgagcttctttgtttccttttcttatttaatttttgtgggtacctagtaggtgtgtatgtacatatatatgtatatatatatgtggttttttcaaaaaaattgtgggcacttagtaggtatatatatttgtggtctgtgtttcttataaattggtaatcccccaggggatgcctgccttgttggtccaggtaacacacttggagtagcaaacatctagacgtagttctcaatagtaggactattgccagtggagggggcattttggaaatttggaaaggcattttggtggcctttggcacttagcaggtggggtccacgggtccatcctgtgatgccataggcagtccaatataacaaagaactgccctcgtcccggtaacatacacctgtgcccccagacattcatttcggtaaaaaacttgtttccattgatctgaccccagaattccctgtgcttatacagatacacaacgtgcactgggtcttccagaaatgcaggggccttctaaatcaagggaagattgtgtggtgttttgttccagtcttttaccaaggtctcaataccatcttgaaacatcatgcagcactgctcataatatttgagtcaccataatgtgatctgtctacatatgtagctgtttgtattcatggtgattaaatagttgggtgctagacatgcccttagcgagcagctcatgagagcagattttgcctgtttcttccaaaatctggattcagtgacatcgtgttggtagcttgaaactgaccgtggtgagaatatttacaccatggaaagtggcaaatgctactaataaggatgattgttttagttttcattttgtaattttcagagttggtttaccaatatgatgtctgtattaaaatatatgtaatgctgctttcaaaatgttaagtattatgagaatacattaacaaaactctggcgaattttttgtcttatgtttcttgaatccaaacctataagtaggtgcaaacattagacgatttcattttgggcttctgatacactcctgtccgagaagttacctttgaaaatgtgtactattttattgtcaattatgttttctttaaaaaaaatttatgacatattacttttgctaattatgtgtgtgggtagattatgttattcatgaattttatttcaggaccttggtaaggggttatacaatatttcttttgaaacgagggtctcgattattgggcttgagtatcctgatctaattaatgcactggacagagctggcagacgtgtgggacacccagctattctctggaagggaagggggatataagagacacactataaaggtgaatggtaattggcatctccccttcaaggggaccaggaggatctgagctgactgggtgcctttgtggaagtgtgttttgaactgagattagagagatcagcaatgtatctcttaaagtaatccaggaggagttcattttcaaccgattcagcagtggaacacttgaagaggaggaagtcaaaattcaaaatgggttgggtgcagtggctctctcctgtaatctcagcccttttagaagctgaggcaggaggattgcttgaggccaagaatttgagaccagtctgggcaacataggcagaccccatctctaaaaaaaaaaaaaaaaaaaattaaattagctgggcttggtggtgcacacctgtaggctgagctgctcgggaggccaagatgggagaattgcttgaggctggatgtgtgtggctatggtgagctaggatcacgctactttacttcaacctgggtgaaaaagtgacaccctgtttcgaaaaagaaaacaaaaagttggaaatgagtgggaaaggatctaagatgattggaaacagtgtacatagaatacaagaggagttgggcatgctggctcatgcctgtaatcccagcactttgggaggtcaaggcggatggattgctggagctcaggagtttgagaacatccagggaaacatagtgtgaccccatttctacaagaagtaaaaaaaatcaactcacacctgtagccgcagctactcaggaggctgaggcagtagattcatttgagcccaggaggcggaggttgcagtcaaccaagatcacgccactgcacaccagccgggggtgacagagtgagaccctatctcaaataaaaataaaaatagaatacaaggggggataaagatagacttaaaatacgctctctagaaaaaagaaagaaatatggaaagaaatctaatttagaaaaatgcacgcacccacaggcacgcttcacaggactggcaggtggagaggatgtttgttaacagggctggctattttactttaagtgctgcaaacattgcactaatgtttgggtctttgcttttggcaatcacttctcttgttaatttttttttggcaccatagaaatgtttccataaatagtgcattcaatggagtgtgttactttattactgtcagccactgtcctaggagaggaaaattcaataaacacaaaagcaaagattagaacgttgaaagcttccaattccagatccttcatgagcttgtacctctaaagaatgcgatttttctatttctccacctgcaaaattcttactttttgggctggtaaagccacctaggtcagtgccatgtccaacccaatctggaaaacgattattgtggtgcctgttttgttgacttaacaaagccaatcgcccattcctatgctgctaagatgcgaatgcccagctcaggggatgagattactgtcagctttgcctaagctttgggcattagcaccctccatatgcaacaaacccacaaatgacatgttttgactctttgacacagaatggttggaaatcacttccttggccagagcaggggtccggtgtaaaggaggaaataaaaataaaaaagcataaatgaatgaggaagtgagcaaatcacactcatcgaggagcaaaataattcattccctctccgtggctcagcatggatgcaaataatgtatcattaagtaagtccacaaaacaaagacagccagcataactgttgcatcaaatatttagccagagccaaaagcaatttattatgttttttaaaataagtttgatttactaaccttcagcacaatccctatttttagaggttggctcatatttttaatttgttttctctgaagcgctgcatccttggtagcgtttcagctgtccactcggttcctaatggcagagcaacaccgaaaagcgtaattacatttcctaattatgtgtaattaggcaaaacccagatgatgtattcaacatgctctgagaatagccaggggttaaagactgctggaatttggtaacatttttataaataagctggtgcgttatttaacgtggaggtctaaggtgacgctgggtgccttgtagaccgatactgtggttgaaatctatcgtatttgtttatttagccaagtaaaactgtaagtgattccccacctccataccttcccctcttttggaaaccagagtttagttgtgctattcttagcccaagagaggccctctaaacccagaaccataaagttctgcttactgacagcctaagtgatatttattttttcaaagcttaatccttttgaaacatggagaaataaatacatcctcttatctaccatatgcctgggatgggaaataaattcttattttcctgccgtgtggtaccagtgggttacgatgaataatttgggcagtctcactgaagataatagggaagccttctctattaccagtgataattatgaatctcataatggaaaacatcccgagcccgaacatcaatcagggaagataaacaatgggaaatgataggtgtacaaaagggaaaatggcaacagcacatgtggagggaaagaccgcagaattctggcagggttataaatcatacagtcaaataatttccgtgcaattaatatcctcaaattaaaacatacctttttaaagaaagattttgcagacttttaagctgggcaactgtctgccttacaagatgcgtctggaaaccccagtgccatcctccttttttagtcttgtatatttatgtatccccggccagagttggctggggcacagtctaacagtgtcaccgtgtaagctgacccagtgaccttgctctagctcaccagggactgagcatacaccaaagtggccagagctagtggttgctgactctcaggatctttggccctgagagaacaacaaagactggcctattgaggcaggaagtcttaacttccttggccagcctgaaaggctgtctccaaccatgcggacacagcgcagtgaagcggttggaaaagctacagacaaatggaaaaccttcattccaaagggtcgttgtctcctcctatttaatagccctgcattcatgcactttttttatcttgctgtctttttttttttttttaatcaaataccaaagtacttctatggactggtcttaaaaaaaaaaaagaatccattcataactgtgaaaaaatactgcctattagtctgctattgtggctcaaaatgaaacttaagactacatggctaatttatttactgcatcatgggtgaagaccaacaaggtttccagcctttcctcctatctgtctgcatgtagaaattcacagaccacggccattctgacatgaatatcaaatgagaagttttccattccaaaccctttttaggagcggcctggaaactggagtcaactgtcaaatatgtccttatggccacaaagtatgctcatggattctcttttacaggcttagcataatattttataaaacatatttttaaagaaagtgtaattttcccccaaaagcaagggttttccaatgccatataatttactaagtgtggctttgctgcgtaatagtccataatttatagtcagcctccacaaggcaaaaaataactccaagctatgattaagtaagtaatggacaaggtaactaatatttccggaagaatggccttccagacactcattttaagtgacaaaatggttgaaggttgagatatgtactaatcctgtactaatttaatggaatcaagaaatgacattataagctggcttatgtgggcacttaagacatggagctgagagtgaatatgagagtgaatattctgcacgtccattttaatgaccttgtgcctcattttccccatttaaggtagatgggtttatgcctaattgtgccaccagtttttcccataaaataattcatttggaaggggtggcctaatccagtctgaaccaattctaagatggtagcgtggatgcgggaggcactgcacaggatggaaagcatggagtttggaatctggcacaagtggatttgaattcagacttagtcatcaggagctgtgggaccttgggaaaggttggttggttggtttgttccagtttttaaattttgaaataaatgttggcttacagaaaagccataaaaaatactgcaaagatttcccatgtactcttcactcagcttcccctaatactaacatgatacatttttcagcactgagaagttaaccttgttatgatgctattaactacactcagactataactgaccaacagactttatttggatttgacggtgtgtcctcttccttcttttacaaccagataccacctggcatttattatcatatctctccagtcccctctggtctgggacagtttctcatgcattattttttttaatggccttgaaatttttgaagagttccggtcagttattttgtagaatgcccgtaatttgggtttgtctgatgtgttctcttgattagaatgacgtggtgcatttttgggaggaatatacataagtgatgtgccattcttcggccatcaagtcagaggatgtgtaatgtgaaaatatcttattactagtgatgttagccttgacctctcggttaacgtggtatctgccagatttctccactgtaaaggatcatttttttcctttgtaattaataaatatattgggggaggtactttgggactacttctcaaattttcatccattaattttagcatccctctggggatcttgcctgcaatgattaatactgtggtattctcatgactgatattgtctttctgtcatgccttctattttttggtgggaattcttctacatggaaggctgtttcttcttctccatttatattggtatggatacgtgaatatttagtttattctgtaggtcataatacgacagtattgtgatatattttggtgctcaaattgttccggctttggcccataggaggtctttcgggcaggttcctgcacccttttgacatgccccgttcttttttgagcactttcttattttttggcactgtaagaggctttacactgtcatcttggacttccctgcctcagtcttggaattaactcattctccatggaggcttggttcgttttattatagaatcatatttagaactaagatctaggtgctagttgcgctcattactgctggagtgtcattgcttctagaacttctcaacagagtttagaaatatgtgtattatacaaacccatgcacatacacctatctccatttattcctgtatctctgtgtatattataattttagtatatttatatttctttctggacacattccattatttgttcatatatttataacatatcagtatctattataaattatatatatgtacactttaatgtgtgtttgtacctaattccaatccaacacaacaactgggttttttcaaacttgtttctttgtttttttctttttgtggagagcagggtcttgctatgttgcccagctcagtctcaaagtcctgggctcaagcgattctcccgcctcagcttccctaagtgttgggattacagacttgagccactgcatctagccacaactgagttcattattctgagctttctttgggatgttatttaactctcagtttcttcttctataagatggaaataataacaactaaaggctaggatttggggaaggtatggtaaattgtaaaaatggtagcttgtttaaaaaaaaaaagaagaagaaaaaggaaaacagtatttccctcaccgcatcaacacctgtcctgtatgactggcattgcccagtggaatcttagcagcagaggcatgacaagcggtcagatactgggactttctgtttcgttgcttacaaccctgtgaccactgcacgaacaaccctgagctgacctgctggagcatggtggccacataaagggagagtggttgccccagctgatagcctgtcggtgcctggcatatgagtgaggtccctctagagtcatctagctactagccaagctaccacctgaccccagacacaccagagaaagagcacagcccattcgcggactcagaaactaaatataagaaaaatggtcactgttgttactcactgggttttgcaggggtttaatatccagcaaatgccaatgaattagagttgacatacggaaaacaagtaagagtaactttgtacaccgtgggctcccaatcagtgctgcttttcgttgttgatgttgttgttaatgttgaaaaaatcttcaagtcatatttgcccccacagaccttcccagacagtctaactaaatgcactgtatttgctaactgttggaacttggcttttggactagaccagcacctcgagaaagaaccactgttaaaatgtaaggctctgagtgtttatcagctcacaccaaggaagagagagctcaggagcgactgggcatgaggtggagtgagcactgtgaatgctggggaatggaaagtcctttatgtggtgttgcctaagggtacggggaacctggcctggtgttgggaggaaacagggtgcagagtgggaagggcaggagtatctaagtggccaaatttagcctaattaacagatttgcctagggctgaccctgaagcagaaagcaaagcctagatcagtctgctctcctcctaccaacagggtaatgatgaggttgaaccaccagttctcaatgccatacatgagattcccaaaatagacgggagttacacagagaccttttttttttttaacctcctctgagattttttttaacctcctctgagattctgtatttccttaatgacccgaaaaatctatttagcccagtttttatccttgcagataagttagtacgcttctttttctgctggttgtgatcatatttctatttaggggtaaaggtgctgaaaatcatttgctgcgatgactcgcaaagacatagttaccatgagcagcagtaggatgggtggccaccagactgccatgggcatgatcactgttgacaatcttgccacagctccccagggtctacttggtgtcccacggaggacagtctatacagtaactcaacattaactgtgtacccctcctagtttggccactgttctgcccaaacatacaagagtcaatgtaagtctctgggagcactcacctttgggcatgttgctacagagtcactcattcctagaaattgcgaagtcacgaagttgtcaaaaaacacaacgacaggccgggcgcggtggctcatgcctgtaatcccagcactttgggaggccgaggcgggggggatcacgaggtcgggagatcgagactatcctggctaacacggtgaaaccccatctctattaaaaatacaaaaaaaaattagccaggcctggtggcgggcgcctgtagtcccagctactggggaggctgaggcaggagaatggcgtgaacccgggaggcggagcttgcagtgagcggagatcgtgacactgcactccggcctgggtgacagagcctgaatccctctcaaaaaaaaaaaaaaaaaaagaaaacaactacaaccacattttgagataggccttccttggcaaactttgatttcgtttctgtatttgaggacaaaacacagtatggttgtttccctccctagactagatttctaatcttgatgcagtgagcaaagggcgaggtttatattgttcttacctgagccaaaggacccataaaaaatagagtgataggctgggctgggcgtggtggctcatgcctgtaatcccagcactttgggaggccgaggtggtcagatcacctaaggttgggagttcgcgaccagcctgaccaacatgcagaaaccctgtctctacttaaaatacaaaattagccgggtgtgatggcacaggcctgtaatcccagctacttgggaggctgaggcaggagaatagcttgaacctgggagatggaggttgtggtgagccgagacaatgccattgcactccagcctgggcaacaagagcgaaattccttcttaaaaaaaaaaaatagagtgatagagtgagaatttggcttttagtctacagaagttttcactaccagtttctgtgtgtgtgagtgtgtgtgagtgtgtgtgtgtaaaataccaaagagaaaacaataaaaaaatagagaaaataataataactagccaatgtgtcatcactccagacaacagccatggtcagtatttggttaacccattcagattttcccctatgaatgagttttttcgcctccataatattagttataatacattgatactacatcccgagtgtttcacttaacattatagcacaagtgtcttcccctgttgtaacatagtgattattaatgtcaaatatcagctagataaaagctgtcaagtgatagaaagtccttatagctcatgaactcttcaataactgggaatttataccgtttatagtttttttactgctaagaataatgttgcaatgaaacgtttgtatataatgctgtttagtcccctctcccccattgtttacgattccttggagttccactgctacttcatatttaccatcaccatccttgttcaccattgttgaagctttatgtaatgacgagcctcatccaggacctacttgtgtctctgtgccagtcactgcctgtgaaccaggggtgtgtggactcagggctcaattcaaaaaagaacccaatcttattgggacaaacagatattgatacccctggtctttgagccccactgtcttttcacactaatgagttcttagtgtctatttttggtgattgagtagaacttggtgccatattggctcaacatggaagatttctgtgatcacttattgatcagtcatgaataaggaatcgggatggcagtcgggagtgtgccaacacctctctcagtattctgggtctctctgcatgtagtgtttcttttgcagctcctagagataaattttttaatgtattacatgtgagttatttgaaagagggtaggtgtggacagtgaggccaggtgacttaatttccagaagcttgcctgtggtatttaccttgatgagttcattaacaatatggctttcaccctcaaacttgctcattcagaaattagactttgtgagcccactaagagtaggtctttctgttaggtacagactctacaataaccaaattcacagaaactgatgtgtaaacccagggtcataaacaataattttcaacaggagctataattatcacatagtttgaaatgctcttgttaatctgagtaggaagagaggatgagaattttcttataggtggaactacagaaaaagagtttacttataggcagaagtacgggtactgagccaagtgacattgtaagttatttaattggcaaatgattaaagcaaaggtcattgcctatatgactcaaatgcttggttgcctcagaagataatgagcctgatactttcacagtgaagctgtattgcacgtttgtgtttgtttattttccatctttcccactagacggtgagggactttatctgtctcattcaccactttgtccaacctaggacagtgtcagacacatagagatgctcaataaatcttggctgaggcaatacgtttcaaaatacaaggtgactccaaatataaaacaattttttattttcaaatgaagtggacctcccctaaattttgtgcccagtttataaactttaggggctgtagatgaactgttcaaaagttttattgtaggatttcacttgctaatgcattttcacaagtaatgtatttattttaaaagactggagtttttatatatccttacatttatgaaataatttcatttaaacccttcatgcccatcttcagcatcattgctaaagcctcttggtttctgtacctgtaatcttcattcattcctcagctgtttgaaacacagcacttttgggatccttgtataatactggccccacaatcaagagtgacttgaactgggacatgtttgtatttcttcaagatgacttttcattctctcatctcattcattttgaggtcattttgttgttgaaatgttagagttcaaccttaaatacttaagagcatggcactgtctagagaaagggagatgagcttctgtggtagccagaggtcaagatggcctctagtgaccctcacttcctgggttttacattgcagtatatttctcttctactctgaacaggattgtcctgtgtaacctacagggggaagtgatagcgcatgacctctgaagctaggtgacaaaatacatttggacttctgctttgcttctcttggatcactccttgtggcagaagctagacaccatgttgcgaggatactcaaacagcaccatggggagatccgcatagcaaggaatcaggcttccaacagtcagaccagattgccagccaacatgagcgagccttgttggaagcagttcctccaaccccctttaaacttttggatgaccacagatgaaatgaccatcttgacttaggagacacccaagtcaaatcagctagctaagctgctcctgaattcttgacccagaaaatctatgtgagggagtaaatatttattaatttttaagatgcttcattttggagtaatttgctacacaccaatattaatacagagcccatatgcgctgcctacaggataaataatgtaatagcttaataacaattaaaatggaagaaaatgtaggagttcctcaatggttccacctgtttcttgaggttaaaaatgtacacatttgtgggcagaaacttttatacagtaataaattctttgttccctctgcatatagcactttctcaaaaagtagtttggtgacaggcttctttcttctcatcattaaatgacatactggagatcagtcagatgaactgcaatttatatcttgcccccacccagtgttgatttgcccggggtcatacagataattagtaatgtcttatctcagttttcttatctgcaaaatgagaatacctgatggggttagtgtgggagtttaatgtctgtaaggtgtttaatttgttgcataacaatatgttgtactatacgttataacaatatgttaatatgttgccatgtatagccatggcaaatgcatagtaaatagcaggtataattattattatttttttcttttttgttttttctgagacagtcttgatctgtcatccaggctggagtgcagtggcgtgatctcggctcactgcaacctctgtctcctgggttcaagcaattcttctgcctcagcctgctgggattacaggcgcatgccacgaagcccgactgatttttgtatttttagtagagacagggttttgccacgttaaccaggctggtattgttttcattattgtggttatcattatttatttagttattgatcatcaaaatccagaaatccagtttcagcaaacattccataacccggtgtgctaaaaccccctcactgctctccattactcatgaatcttcttgaccatgaggcagaatctttgtattttcttctcatcaaggattttatctgaaaaacctgtagtacttcgcctttccctgggtggagaagaggggcggataaatacttctaaagtaatgtagtatgcactctcctgcgtggtgggggtgtagtgggcttcctgttatgaaacccagcttgtaagcatgtatctacatcccagggaggttttcactgaaccaagagatgccataagcagtccttgttgtaataatttaatagcgaagccctcagcaatagatcttcaggtaaaatggatgctgactgtctgtctgtcatatgaagattcagacattgatgtaatttaaaatacttgtagtatcatggatacaaacatatgcctttttatttctgaaggaatttccagaatgttcgattaaaaaatgaacagaggaaatgaaaaataaaattgtctgttgtaccaccacctgaagataaccactactatcattttgctatatttctttctatatttttctcagcatttacacgattgtttttacatagtagtgactttgccgaacagttatttcatttcgcatcttgatattttttctcaattaaaataataattgtgaacattgttctttctactctaactactcaggttgcttataatgagcttgtattataataaaacttcattttattttagataaaatgaaaagatgttactatgcaggtaactttatttattatttgcatgcagtttatcaaatagaattccttggttcagcaaaatgaaacctttaagtcttttagcaccaaatgtttgaaattatcatgaaacacattctaatttggcagtgagttcaggagatgaagactgtcctttagttaacatcaatagctttctaaaatatgtagccagttaatattttacttctgcctatgcatccctcaaattgtaacacccctggaacataaaaattcctctattgagattaacacctaacgatacctgtatttgctaatttgtttcttttttttctttgaagcagcatgttgctttgtcacccagactggagtgcagtggcgcgatctcagctgactgcaacctccgcctcccgggttcaagtgattctcctgcctcagcctcccaagtagttgggattacaggcacatgccaccactcccagctactttttgtatttttagtaaagatggggtttcaccacttttggccaggctggtgttgaacccccgacctcaggtgatctgccctcctcggcctcccaaagtgctgggattagaggcctgagccaccgcgccagctctatttgctgatttttgaacagcagctttttttttttttttttaacaaaactttaaaatgggttatgtgttttattttcttagtgaagtaatggcttctcaaatttacactccattattttatttaaaaaaatcagtatgattcatcataaataagtcaggactatgattgacagtctacctagaaagattaggaaagtggggaccaccccccaattattacctttgtttttacaagtgtgtttaaatctctttctgttaatttacaatttgaaaggtgggtgaggagaagagtttgaaaaatagattactgtcttcattaatacaggtttgacctacaaagtcttcacgtacttaatgattaaaaaccaaagtactaaataataaattataagaatttataggagtcatcttcttgaaattagcttactgaatgttcttatcataataaatctgagtgggtgtctaatttagtgttagctgactaaaattgtatgttgcggggaggaaaaaaaaacacttttgtttgaagacaaatgcagtgagtttaatcacaggtgatctgaaaggcaccacctatcttttgctatgttcactttgcagaaactttggcgaaactggctgaatgaagatcgattccaatttgtaaatgtggcagacaataaaatttccccaagcactttgatgatgtttgtgttaatacttcctgctcagagctgtagcccatcagattctagagctaaccgaagagggaagacaacctgtcttctcccagtttccagcctgtatagacttaatcattttcaaggtttaaggttgtttttgtttattggttggggtggagagagacgcaccacctctcctaacttctgtgtttgcttccctcatgctgtgtggatcagaaaagatagcctgttcattcatcacttatttcctgacttccaccttgggtctgtcagattctgtgtgaagcccaggggatccagggaaaattgaggcccagtccttactctcatgtaactcgaagtcttttacagaagacagacttgggaacaaatcaatcaaaatgagttttgtacggaaaaagtcggtgcacgcacaaggtacccaagaaggaggtgactaactttatctaactttacttgcagggcaaggcaaataattagggaaagtttccttcagacaggggaagacaaatatgagtatccagggaggatgtttctggcagagggatcagcataggaaaggagttcagggttgaaaagagtcagtctggtccctagaaataatttttttggtgcataaagggccagaacagaatgacagaggaaaatgataaggatttaggcagggactgcgttggaaagggccttgcaacaggcctggacgttgtttgtaggcaagtaggggcaccgaaagctttaaagcagggagtaacaggcttgtagtgacttttatcgaagtagaagttgaatagatctagcctggcacagtggctcacgcctgtaatcgcagcactttggttggctgaggcgggtggatagcttgaggtcaagagttcgagaccagcctggccaacatcacaaaacctcatttctgctaaaaatacaaaaatcagctggttgtggtggtacacccctgtaatagcagctactcaggagtctgaggcaggagaatcccttgaacccaggaggcagagattgcagtgagcccagatcatgccactgcactccagcgtgggtgacagagcaagactctgtctcagaaagaggaaagaaatggaatagatctctttcagtacaatgggaaggggcatataattcagtactttaaaaaaatgtactatcttatgaaatagaaatatacatgtacatagatttaacacacatattcacgaacatacacatttacatatacagtcatcattgcttagagaggaggttgtgttctgagaaatgcttcgttaggccattttgtcattgtgccaccatcatagagtatacctatacaatcctagatggtataacctgccatactcctaggctaggtagagcatattgctccctggcagcaaacatgtacagcatgtttctgtcctgaatactgtaggcaattttaatacaatgctaagtatttgcatatacaaacatagaaaaggtacagttaaaatatggtattacaatcttctgggatcaccattgcatatgtggttcattgttgatcaaaatgtcattatgcagtgtgtgatagtgcttaaataatttatctcacatatgcaaagagttttggctaagggaaaagaaaaatgtgaacctcctaatagaaaaatgggcaaagataatgaacaagaaattcattgaaaagaattggcaaacatgaaaaaattctcaactttatttttaatcataaaaatggaaattgaacaatgagatactgtttttcaccatgacattggcaaaagttaagaaggcagataacttccatgttggtgagcatgtaagtataaaaaggtataaaaaagaagagttgtcctgaatctggtctggaatagaacctttttttccatgatgcatgatgtaattcacagcctcattcctgataaattgcttaagcaattttctgataaactttaatgcgattaagacttgttctgagaaatcagtcacccatctacccaagctgactgtcggtcaagagtctagtgaccttaaaccaaatgttattttccttttgtatctagcctaacattgactatcttgtcatttcattttcctataaaatgcctccaccaaggctgaatctttgaattgatcactagaggccttttccctagtagtaacattataataaaactttgactcatgctcataactcgattttccaaaaagttttcctttacaggagaaaagaacatctgctgtttataggagcataaattgtttttggttattttgaagaacaagttggcatttttgaccgaaattaaacacatgccttttgatcaagcaattccattctgtaccagaaaatacagaaatatttgaatgaatgtgccaggacacccaattagaagaatgaatgcttttttagcgttattttgtgtgcatacatatttatttagttatttgacctattacattctaaattgatattaataaagaggtatttgagttacagtttttccaaagttttaaatactctatagcaaaaaaaggaaaaatgaaagaaattaaaaagatacctctatatacatacattgtgtgtttgtgtgtgtgtgtgtgtgtgtgtgtgtataaattggctgtgcatgatataagtttttatttcaatcgttttaggggtaaagtggtttttgattacatggagaagttctttagtggcgatttatcagatttcagtgtacccatctgagcagcatatgctgtacccaatatgtagtcatatatatatatgtgtgtgtgtgtgtgtatgtatatatatgtgtgtgtatgtatatatatgtatgtatctgtatatgtataatggctgtccatgatataattttgagttggaaaaagcaaattgaagaataatacatgtattatcatgtctttaaaaaaaaactatacacatagctgaatgtttttgtgtgtattttcataaaatgatttggggttgaggtgataaacagtaattataaatagtggtagataacttctatcaccagcacggagtgtggcttaggagctgagaaggctttgaggagggaattttctttcttttttctttacctgtcatgtttgaattgtgttccatcaacatgtcctttttatttttttgagatagtgtcttacttcatcacccattctgtagtgcagggcacaatcacagctcactgcagcctcaaacttctaggcttaagtgattctcccatctcagcctcctcagttgctgggaccactggcatgtgtcaccacatctggctaattttttgaacttttttgtagttggggtctcaccatgttgcccaggctggtcttgaactcctgggctcaagttaccctcccacctcagcctcccaaagtgctgggattacaggtgtgagccaccacggctggccaatatctactagttttgaaatttaaaaaaaaaaaaaaaaaaaaaaaaaaatatatatatatatatatatatgtatatatatatatatatatatatgaaaaaaaggacaaacgatttcagttgcacaactataatcgatgaagtggctccttgatgttctcggggtaatctgagacactggggagaaccctccacctttgcagagaagcaggatgaaggggcctaaaatgagttcaactgatttcaactttgtttcccagcataaagcttgggctgagctgcctgaaagggaagtggagaaggcaggaatggaattgatttttcccccctgctgaattccccttctccctactcccttcctgcaatttctaataaattagaagagctctgccttccagaaaagagcagaggtaccttgcagtacttttgggaatcttaccaggaagaactgggtctactattgcaaaggaaaagctttttttacagtgttaaaaattaattaaaaatggaatgtgttatagctcgatttttatcattagcacccattccagagggcatgttgctgttagtaaaacttcagatttttcctgtcattatggatttggttttagggaaaataccttcatgttcagcattttatgtgtcagtccctaaaactcatgatcttctgtgattctcttggtttaagagcagggcgagtaatgtactcaaaaatttctccatagccttctgggttagaggatataacagctggcaaacagaacactaatagctattgatggttattttcaaaggatggacatcgatagttaagttttaaggaagaaaatgaagaggaaatttaatgtgatttaacagtgattttttttttaaagacattatttgcatctcctattttcacttacttataaacaggtggtttccaagtagacatattttttgcttgcttgaatgagaaagcataatgaactttgtgatttggtgacatatccagatagctatagcaaatagctataatgccttagataaatagcattttcacgagtaaactttttagttctcaaaagaaaaattgtaacaattttctagccgcatattagcattatgcacaaacacataaacttttggctggaattgtggaatatgaagtagctcccatccttattccatcgcccatatcctaaaatgtagattgtattagttgagaaattttaccaaatatttacttatactgtgctattatttatactatttgtcaattccactatagtagatgcttaataaatatttgtgaatcagtaaatggatggatgaatgaatagtggcctacttctgtgaaggtaattgaagaattcccacacttggccccctttggatataacgtctgttctgagcacctcccattcactatcttgatgcctcacataagacctagtatatagtaggcagtcaatgaagatcacaatgaattggctagactttgatttattcatttatgcaaattgcctgacattcaaagaaaaaagaaggaaaaaatggacctcttatcatgtgccagacattgttctaagagggaaagatactgtgaaaaagaaaagtccctatcctggtggatcttagattatcgtggagaaggtaaggcaacaaacacaaaataaatacttcatataagttcaggtaatgataatgcgtgaaaaagaagtgttcttcctgttagcagtgccaacatccgctttagtgctctgctgcactgcaaaatgtgtggatgttcttgagtatgtctgggaactagctaaaattagggagttaaaatgatccagcttagctcaggctatagggaggatttctctcccaggtgtttgttttgttttgtttttgagatagggtctcactctgtcacccaggctagagtgcagtggcctcaacctcccaggcccaggtgatcctcccacttcagccccctgagtagctgggactacaggcgcatgccgtaactcgcaactaattttttgtatttttttttgtagagatggggttttgccatgtttcctaggcttgtctcgaactcctgggctcaagcaatgtgcttgccttggcctcccaaagtgttgggattataggtgtgagccactgtgcacagcctcagaggtcctgtctgcctgcctgcctttcctccctctctctctttcttcctctctttgcttctttccttttttccttctctgttgaaggcctgaataaaataaaagactgagtaagaaagaattgactccctctgcctgacttcaagctgggacgtaagtcttctcccagtccatgcatccatccatccacctatccacctattaacttattcacactggctttaaaattatttttggctccagcttattattttaaaatgtaaaatgatttacagaagttgacagagagtataattaaatcccatgagtctaccatccagattcagtaattattacatgtggccattgttgttttatctctctccacccacttcccccatgcctgaaaatttaccaaagtaaatgcaagacattatatattgttattcatagacattttgagtaactaaaagtaaggtctctttaaaaaatgataattacagtatcatcatcacacccaaaaacatcacaaattatttaatatcatgaagtgaaggcccatttttccaatcattctctaaatattataaatgtcatctttcattagtttgtttgaattccaggtaaaaacctttaactcatttccttcttttgatttttcaaaagttggttgaatagtttctgtcttaaaaagtccagaaattgttgaaataggtaaagcacaaaagaaattaaatacaccatgtttccaggcctctaatgttttctattcaaggttgtaatatccagtgcaaggctaaaattgctttctggtgataaacatttgagaaagatttggttgttggtgatactgatggttgtagtaggagtctctggagaaattgaactaatactatatgtgtgtgtgtatctatgtatagatatagatacacacatgtatctattatatatatagagagagatatatgcatatctatacacacctacgggtgtgtctgtatctatacacacacctatgggtgtgtctatctatatctatacacacctatgggtgtgtctgtctgtatctatacacaccgatgggtgtgtctgtctgtatctttacacacctatgggtgtgtctgtctgtatctatacacacctatgggtgtgtctgtctgtacctatacacacctatgggtgtgtctttctgtatctatacacacctatgggtgtgtctttctatatctatacattatatgtactaaataatatatataaacactatagtatatagagtatacatatacacactatagtgtatgtactatacactgtgtactaatacagtgtataatgtatatatatagtattcaatatagatctataaacacacaagtgcatacacacacacatttttctgtatatatgtataaagatatatataaagatttttaaataaggaattgactcatgaaattacagagactgagacatcgaaacccaggacaaccaatggtacagttcatgtctgagtctgagcagctgagaagcaggagataaaaaggcatcagttccattccatatccaagtctgagtccaagggcaggagaagctgatgtctcagcttgaagtcaggcatagagaggcaattctttctcactcagccttttattttattcaggccttcaacagattgtatgaagccacccacactgggaagggcagtctgctttactcatagtactaatcgaaacgttaatgtcctccagaaacgccttcatggacacactagagataatgtttaacataatatctgggtatcctgtggcccagtcaagtggacacatacaattagacatcatggtggttatgccaagttttttttttttttttttgagatggagtcttgctctgttgccagggtggagtgcagtggtgcaaccttggctcaccacaacctctgcctcccaggttcaagcgattctcctgcctcagcctcccaagtaggtgggattacaggcgccaccaccaagcctggctaatttttgtatttttaatagagatggggtttcaccatgttggccagactggtctcaaactcctgacctcaggtgatccacccgccttggcctcccaaagtgctaggattacaggcgtgagccaccactcccagccagccaagtaagttttaacttggaaacaatgagcagacactcgcagtacattctctacttagtatatttctttttcagagtcatctcaaaaatctctaggccaagtgttcttaactatggaccttgatgaatggaccctgagtatcttagaatcttctgaaataatatgcagcattatattccatttgtacctgggaagagggtacttgtctttcatcagagagtcaccaatggaccactggtccctgctgatttagtgtcacagctcaaaaccatcagtagtcctcgtgatctttcggcattgtggctccctttgtgagaagggcctaagagtgaatctcccaaccataagctgtattcaggcaggcacgaagtctcttatttactcagtgtttctggagcccagcatagtgcctcgcacacagcaagtgctcagtgggtatctgttgaaccggcaaaacaaacaaatgaataaattaatgggtggtcactgtactagttttctattgcttcataaacaaactatcacaggcatagtgagttggaatgatggctctcaaaaaactatgtccacatcctataaatgctattgtacaatatatggtcttttgtgattggcctcctccacttagcatcgtgtttttgaggttcagccacagttgtagcatgtccatctctctttgtgtggctgaatatcattgcattgtatggatataccaaatatttttctcctttcatctgttgatgggcatttgtgttgtttttaccctttgactattgcaaataaagctgctctgaacatttctgtgtaagtttttgttggaacacctatttccagttcttagggatatgtatttatatcaagccaaactacctacctaaccacctacctgggagtggaattacggggtcatacagtaaatctatggttaattcatcaggaattattttataaatttttgatgttggatatctgaagataatacagaatggagcccttttttactttacagattttttttttttttgagagagaatcttgctctgttgcccaggctggagtgcagtggtgcagtcatggttcactgcagcctcgatctcctggggctcaagccatcctcccacctcagcctcctgagtagatgggaccacaggcgcatgccaccacacccagctaagttttgtatttttttgtagaggcaaggtttctccatgttgccaaggctgatcttacactcctgggatcaggagatccgcctgccttggcctcccaaaatgctgggattataggcatgagccactgcacccagccctggatttggctttttgaaacagggctgcacataacctccatgatgtgattctggctgtgtctgttgaggtcccattgggcccagctctgagattccctgttagcacagggtctgacacatcacagatgaacaatggatctttggtaattaaaaacagagctgtgtggctatttttctccaactccttttttttttttttttttttttttttttgagacagtctcactctattgcccaggctggagtgcagtggtgtgaactcggctcactgcaacatccacctcccgggttcaagcgattctcctgcttcagccccccgagtagctgggaccacaggcgtgcaccaccacacctggctaatttttgtatttttagtagagttggggttttaccatgttggccaggctggtcttgaactcctgacctcaagtgatccacccatcttggcctcccaaagtgctgtgattacaggcgtgagccaccgcgcctggctttcaaattccattttttaaagttagtgctttaatatgttaaacacccttattaacatattacatatgttaatatgtaaaataaattccgtacattttaaagtgctaaaggttgtatgtttgtgcgatggatatgtttaagagaatgatttaggatgcgatcagttttttttccttgacttactctcttcctttatttttttcccttcttcactttctctgttattccttgccaatctcataaataatgtaagacaacttgcaagacttattaaatgactgatttccttaaaagaagtacgtcaggtgaagggcagatagaggtcaacaccatagataaatctttacactccagtggactttgattcacatcatggctccttctcttccttgctgaggcttttgacaatttcaaatgctccctgaacctcagtttcctttgccacaaaatagcaatacaaatttataattccttagattgctgtgagaatgaattgaggcaaggtaggtaaagtgcaaggaattgtgtgtggccggccaggtgcagtgtggctcaagcctgtaatcccagcactttgggaggctgaggtgggtggatcacctgaggtcaggagttcgacaccagcctggccaacatggtgaaaccccatctctactaaaaatacaaaaattagccatgcttggtggcaagtgcctgtaatcccagctactcaggagacggaggcaggagaatcacttgaactcggaaggcagagtttgcagtgagccagattgcaccaccgcactccagcctgggcgatgagtgaaactccgtctcaaaaaataaacaagaattgtgtctggcctttgtgatagttactcaacaaatcatatctgtgattgttttggttttaacaataatggtttttaaaaaccgtaggtgatcacatactacgcagaaagggaagcagttacagcattcacagcatccgtgagtcatagactcactgcattgctccaaggtgcagattctagttggaaatgttaagttttttagagcaatgaaaaaattgatctctttctcttccataacatagatttcccatctagctcctgggctaacttttgtttagtagttgtattatgaaaacaccgaagaatccttctgccagtctccatagcagtgatataaatcagagcccgcagtttcatgaatgcctcgctgtgccaccaggattttcttggagggagccacggtcagatttcaagtggtcatttcactctttctccctctgggggactgagacatgattaacttgcaataattgtgactccctcattaaaggagagctgtagcaagggaagaaatcattgagactgatcaagacatcccgtgctattttttttttcttgcatatcagctgtgtgggtacctcttgttcctctgtccttcaggttagtaaaacgaagaacagttgctgaagctatgagctatcgataaaagctaatgtaccacacgaaattggaaggggaacaaaatcacttaagtgttcagggccaccaaggcactggtgcatcccctgtgagcctatttggctcctggcggtgtttttgttgccctggcttgcaacgtagcctgattgttctaagtaaatggcagagcacgcaaatcaaggacattggcaataaaccaggaatgcactgtttccagccacgggctatccagggaattggggacagtctgtaatgtatcttgagctaggaccatatccaaattactggcctttccagtttttcttaaaatagtagggtcagtaggtgaccacactcagaagccaagcctgcagcatcagggctgaggagcaaactctttctttggtctgaagcttcaaatatgaacccttgccaccagctgcataaatatgatagccaaagggtttcaaatttgtgatttgtcataaacgctcctattgcaggctgggtctagtccttcttgactttgtggaaggagaaggcttgaggaagtattcacaattggagaagggcgccttctgttatgttcttagctcactaaaagtggttaatgatgagaaggggtgggtcaatgacaagaaaagtggagaagatgagacagacaaaactgcaactcatcttcatggcacactggtgagtgggggagtgcaagaagtttaggtgcaaaggacaatggagtgaacatcttggcttggttaacagaagaaaagaataccaacgccgtctattttcatatccctttctattttatgtacatatttatcaatatactttttgttccagaaataaatgggaacttaggcacaatcttttacacatcttacctcaactggtgactcttcataatctagagctattatagtttccaattgacagatggggaatctgagactcagagaagttaaatgattttgtgtgtgtgtgtgtgtgtgtgtgtgtatgtgtgtgtgttttgtttttttgtgtgtgtgtttttgtttttttttaagacggagctttgctctttcacccaggctggagtgccttggtgcaatctcagttcactgcaactacaacatcccaggttcaagagagtctcccacctcagcctcacgagtagctgggatttcaggtgcctgccaccatgcctggctaattaagtgagtttcttaaagtcctacaactggtgagctgtgagctgtaaattgtggaactaatttttatactgccaatctgaggccttttctgacctcatcgctgccactgtaaaatgaattctagccccagaccatgacatgcctactagcttagctctaaccagaaagatttattatcccaagagttgtgaaaatgtggaagaactagaactgtcattcactgctggtgggaatgtaaaatggtacaatgaatttggaaacagttgtccagtgccttaaaaagttaaacacacacatatgtggctcagcagttcccttcctaagaacctactggaaagaaaataaatgcttatacaaagtcttgttcatgaatgttcatagcagcatcatccatgatagccaaacgccggaaatacccaaatgtccattagctggggaatggagaaacaaatgtagtctatcgacacaatggaatactactcagcaatgaaaaggaactaactctggatacctttaataacatagatgaacttcaaaaacattacgctaagtgaaggaagccggtcataaaagaccacatagtatatgatgacatttatatgaaatttctagaaaagatgaaactctatagacagcaaacagaatgatggttgcctggggctgggagtgagtggaggggattacctggaaagggtggggcaattttggggggtcaagaaaatgttctaggacaagactgtggtgatggctgcacaactggataaatatactaacatcaaactgtatatttacaatggttaaatcatatggtatgtgaatttcacattaataaagtcataaaaaatgaattccaggaccattaaatcaggtgactgagccaatagttacaggaacatagaaagattttcacccattctgtataattagacaaattctgttactatctgtccaacagtttagcaagagtcactctgagattgaagagaggaagggaacgttggaaccaatgctgatgagccattcataggctctggctcactatatatgtctaaaattcacatgcccctaaccctcagataatgaccattaataatctggcaggagaggaaagacctgcagctcttctagtccttatgctatctcattgtctcatggatttttaatatgtctttgcatcccttagaaatttgcacttttcccccctttttccattaaaacacacctgcgtgcaaacgtccatacacacccatgtacacacagacacacacacacatgcatgcgatctgtaaaaagtcacaaaggccaaagttttaaaggaagaaaataaaaatcacctgtagtcctatcattcagagataaccactgtatgtttatttacattagttttgattacattagtttagaatgaaattttaaatacactagtatatgtaattaaaattgtatatacgttttagtcaaccatcagctgacttattcatgttctgtggactctgtggtgggtggggtccaagcctccctgaagcagatctctatcctgtcaccctgctggaaatgaaacacttaggggttagaaggggatcaaggaaagtccgagagttggttgtgattatcttcagtcagaaagtgcctacttttccaagcatccagactgcaacctgtttttcctactcaaaatggtttttatggattctattcttatttggcaattgcctggactacagtcaccaacacaagtttatacgcaagaagtgcacacagccctccctcccagctcatccggtaacaatttagatgaaggatgtaaaataggattcatttcatgacccaagtctggtcaattgaaacagccgattgaagtgctgtgttgaaaaggattttgacactgcgcatgggctcgttgggaaagggtgtcatgatgggttactgattctgcggtatttttgtggacgtggggagtggtggcctacttacagtgcatcgcccactctgatttagatgagcaagagctgctgagttgtagatttctagtttctaaacaacaataagtcttgctcgcagatagcctcttagcagagccaaaagccagcagagagaagactcagcatttgctttggagtaagtttgtgtgtgtatgtttatctcccttttactcatgggctcttttttcccaaataactgaggggccagcacatttggagaacatgggatttatcattgacgtcagtgccttgggagtctatgtttatgtgagcttaaaggttttggaagctgaatgacacagatcaaagtctctccactgatctgtcttccagtcctccaggggacttcttccatcaactacaaatcattgatcaaagtattggtctgtcacctgtccatgtgtaaggccaggcctaagtgctctgacagggcatgactcaatcctcaaacaggaagggggaaattgctttccgtctcctaaccctaagatcctggatggcaggtaatctgcttcctcaagattctgttgatacacattcaggactctggtttctgttttgcttgatgacaatgacccagtttctttgactaaataaatgtatagacacacattacttcttttcattctaagaatcataagtttttcaaactttagaatcacaaggtccattaaaggacatctcccctgaccttcccattttgtagatgggaagactaaggtccaagcttgaatgacctgccatcatggggataaccggaattgatacaatgtcttgattcaagattcagagctcattttttctgtgtcagattaaaaaaaaaacaaaaaacccttactgatcttttaaatatgtaattcttcctcctcttctccccttgtctctcttctcacccctaccaatgtaatcagttctttttttcttttttggagacggaatctcactctgttgcccaggctggagtgcggtggtgcgatcttgcctcacggcaacctctgcctcctgggttcaagcaattctcctgcctcagtctcccaagtagctgggattacaggtgcatgccaccatgcccagctaaatttttgtattttagtagagacgggttttcaccgtgttgcccagggttgtctcgaactcctgagcttaggcagtctgcccacctcagcttcccaaagtgctaggattataggcatgagccaccatgcccggcctaatctaatcagttcctttaaatctgaaactgtctgcctgattctggtttaccacaaccaccagagtcttaagtgtcccaatagccagggtctcatagactctgcttatggttaattcttctggggaaattaatttctcgaggtaaaacaagtttttaaattatcccctatagctcatagaagcaattcagtaaatacttgttgaatatcaaatgaatgaacaaatggcattctacattgaatatagtaattcccaactttcgtgaaggttgttttttttttttttttaatgaggcaatcaggggtaaaaacccccgctgctgtcctaagacagaaagaggggggatttttccccccatggcttcgtccttattcttataacctgtatgcactgctgaacctgctgaataaccatgtcacagtggcaggagagggactgggtgaacttgagcctcgatgcctggattaaagccttgtaatgatgtttgcaaagcaccagggtgataactgaatggttggcacaggcttcgatgaagcttgtgtccaccacagtttccagtgcttctgcacctgggtggtcagaaatgagtcctgtgagacacaggtgacaagatctccaaggaagcagttcacgcttggatgactctggagctgtggtgacaatctaaatcctaaattgaggcttactaggaaatgcactaggtaacaggctctagagaaatggctattaccaggttgctcaggctggagtgcagtagtgcaatttcagctcactgcaacctctgccttctgggttcaagcaattctcctgcctcagccttccaagcagctgggactacaggcaggcaccaccatacccacctaattttttgtatcttttttagtagagaggggtttcaccatattggccaggctggtctcaaactcctggcctcaagtgatccgcccaccttggcctcccaaagcgctgggattacaggtgtgagcccccaggccctaccctgggcccctcctttctggcccctcaacctgttttcttccagccatgccctagggagagcttggctgtggccttgcagaccctctcagatgccactcaacaagggccaactggagagaaatctctagtctagggcacaaaatttctgtcaacccttctaaccagtgtttgaagtacgtaagacgttcatttccacttctaatgaggaattagaggaacggatttataaaggaattctggttataattgcaggtacttttagagacgatgtctaacagtgcaacccatagaaccaggctgcctggattcaaatcccagctctgctattactgagatctctatgagagctcagaaaagtttacttaatttctccaagtctcagttttctcataagaaagatgggcataaggaaataatgtagggaaaacacttgttgcagactgaggactcaacaaagttataattaaagctattactaacgtcattattatgaaaatagccatctttttttaaagaagggagttaaaggaaagaaatgccaggctgagagatgagacagtgaattacagtgggggataaaggggctgtggtgtcacacaggcctggcatctgtggccttgaacaagtgcattaatcactctaagcctcaatttctttgttttaaaaataattaactaaaataccttagggcacatggtaggaattcagtaaatgctcactgtctttctcatccttttgcttacctcacatttgcttgcagccagtgctcaaaaccatagacaggcagtgtccccaaccactccctgcgtttctctttctttgccttccgaagctgccatcttggtggtttttgaagcatcaacacttacttcacatgcagaggccccttttatttatttatttttaatttttttgagacagggtctcgctctcttgctcaggctggagtgtagtggtgtgatctcagctcagtgcaggcttggcctccagggctcaagcagtcctcccatgttgacctcctttgtatctgggaccacaggtatatttcaccatgcctggctaatctttgtgtttctgtaaagatgaggtcttgctatgctgcccaggctggtctggagctcctggcctcaagcagtcctcctgctttggcctcctgaagtactgagattacgggtgtaagtcaccacacccagcccagaggccttctttaaatgctagtcctttttctcttcctccatctgggtcttggttccatgcgtattcagtttgtgaaaaatttgagtcgtgcacttattatgtatgtgcttttctgcatgtaattatgcttgataaaaaaagtttaaaaatttgttttagatagaggtttgaatgtcactaattaccaacgtgtagctcctaattggaattaagaagggactagctcctattatcagagatctggtcatcacccttcaagttgactatctccttatgctgattttttttttcttttaaatagcagcacaaatatttaccatctagcagatgtggtaagaatgtaagttgttcagccatttacagcttagtctttgggagatatccattcattttaaatacttggagggccaggcacagtggcttataccttgtaatcccagcacttttggaggctgaggtgggaggattaattggggctaggagttggaggctagcctggggaacatactgacacctcatctctataaaatattttttaaaactcagctgggcatgatgttgcatgcctgtcatcccagctacttgggagactgaggaggacgattgcttgaggccggaagttcaaggctgcagagagctgttattgtaccactgtactccagcctgggcaacagagagaccctgcctcaaaaagtaaataaaatagtaaaataaaacgagatatttggaaggctatgtttttttgccaggccatgtgcttagtccctgggagtatagcgaggggcaatcacaggtcaggtcctagtgtctctgaagacttcattctagtggccattgaaaatgtgtaactacccacagtaatcaagttaaagaaaggttctggctgagcacggtggctcatgcctgtaatcccagcactttgggaggccggggtgggcggatcacaaggtcaggagtttgaaaccagcctgaccaaccctgtctctactaaaattatttaaaaaaaaaatagctgggcatggtggcacacgtctgtaatcccagctactcgagtggctgaggcaggagaatcgcttgaacccaggaggtgaaggttgcagtgagctgagatggcgccgctgcactctagcatgggcgacagagcgagactctgtctcaaaaaaaaaaaaaaaagcttccatttgagccgccaggaaaggaggccctgagttggggagttgaatagagagctgcatcctgaacagacatgatcttgggtgagtgagaggctaggagcggagggaaagcagacgcagttgctaaagctgtcaagtcccgctcccttggaatgcagtcctggttctgctacctccaactgggtcgatttcaaaaaattatggacttgtctgagcctgatgtggtgcctggccagggctcactgcagcgcctggtatacaggaagaacttgatgttattcatggcaaaagatgtctggatggtctccactacagattctgatggcaagtgacttaaagacatgttggcaatgggtagtggacaaaaattgaaacaccttcaactgtgtctgtgaccagaagatttttttctttttttttttttttttttttttggctgactgtcatgacttagtaaggccatcacaggttgccagaacatctactcaactgttccaagcataacctcctacacaggccttctacataggagtatatttggccaagactcaccactagaagtgatttccactggactttcctacagcaagtggtaaatgatccctcagataggcccaagagctccccttcaagcatagagacacaaccctgtgaaaacatgcattggaaccaggaaggcctgcccccatgacttcacgttgcatacatgcctttgaggacttggcctcttaaaggaatctttcaatatcctatgcttctgagaaagttactatttcatttgcagcaggacaactcaacaagctagctcttcctgcccagcagactcggtggattctgaagagggtctcgggctgactctctacttcatgggtttgaattcaggaatgttgcaagattgcatgagattaagccgctgaaacctttctgaggaagagccagctcaaatttcagtgttggatgttcaccgcttctttagggttctaccactcccagtaaatcaagtaataggtttctgttaaaaaccccagtgtgctgatctcagtggcagccatcttgctttgtaagccttctctagctttatgatgctcccagtatataagacatttccagtgtctagtccaaattagtatttctctaattctcgagtgtctgatctgcctggctagaatgattaaaacaaaaaaatagcaaatcagtttgacagtccacttcattaagtggaggacagtgttttgattgctatttaatctgtttttccttctgtctgttcttggctatatggaattcactttgcctctcttcccgactcttcatatcccttatctcaaggtgagtatcgtcagaatcccggtacatttcaccagccaccttttatagaagcttagaaagatggaggcaaacccataaacaagacttggtttttctaagccacagtggcaatttcctagtcgattacaactgtgtctaccctttcaactggcctgtcagtgtaggctctgcatgtcctggataatcctacaattggtgacacggttattgacttacaggtttctagggcatctcattcgttttttaaaagaatgtttcttccacacttttattgcttagtagaaacttgttctaattctttctcctgataccatttagcctattagtacctgggaataatcaccctcccttatctagtcctacagatttgttttgttttgagttatacccactttaggtctcccaccctctcttatttttataaacaggctccatggtactatatacactgcagatggacagctgccaacctgctctttttgtgctgaggaactctagatatttcaactagtttacatgactttcttacctacgctaccttataatccttttataaattttgctttacgttttaacaacggaaaacacttaaggtttttttcctttctttttttttttaattcttccgccagctatctttaaaagcagttctaaaacttcttattttaatattgtacccattgtactttagtctaagtgatggctgcttatggccatgccctttcttctgcactttgggtgttttgtctggaattttctctcctttccttttgtgaaaaaggatgaattttccaagactctgttatgacagaaactcaccagttctctgttgttaatcaacaaatagattgtgaatgcttgactcttctttttttttttttttaaaggagtttcaagggtaagatctgctgtcttgtgaatgtcaaagaagtttctcattcgcccctttcttctctctcccagtgtctttaatttgttaatgctttcgacttattttgctttggataattttcaaagtactgctttctctagagatctctaaaaggcagaagttctggctattaaagatttgccattctcagaacagcccagttagggtaccctcaggttatttataactggattttatctcagaaaattaactaaaagaagattaaccaaaaatctaaaggaaaatgccttaaacacctcatctattatgctgtgctcaaacagatattttcatcttaacagcttggcaaacccagtggaacgctctttctagtttggggcataaaataagataacactctgaattcctacaggaaatcttgtaactctacttaaaattaaggcataaagtaggaaaatgtgtttcctctgtatagtcttattactttgcctgttaagttaactggttcctatttctgctggttcgaagaggtccaggacatttaaatagctcttctagaaacaaattcttttccttacaagccctgccaggtcagtgggttcagtaaggaagaaggttttgtattttgacaattccttcatctgttaatttagtcagacgaggaaggaaacgagaaaagttattcctatttcatccatctaagactttatatcccatttcaggctgattaaaaggcaaaatcgtcacagtaggacaccaaaccctctgtatgccctgcctgcctccccccctctgacccgcctgcctcccccctgtgagctttttccacctactggcctcttgttcttcttcagctgttcctcagacatgccaggtgtgttcctgtctcagacgctttgcctttgctgctccttctgcctggagtattcttccacgtagcaccatgagctgttcttctccaaaaggctttgctcaactgacactttctcagtgaagctgtttctcaccactcactataaaatggcagcctgcctctctgagccttgcaccctctcttccttttcctgctttgtattccttgtggcacttattatatcacatagatacagacatagatgtggacatagatagagacatagacatacatgagttttgtgtttattctcctattctctagaagaatgtaagtttgtaagtactgagatttttgtctcttttgctcactattgtacttcagggcctagaggaaggcttagcacgtggaagacaatatttattggaggaatgaatctagaaatatccttggatgtataatgtccaactcactctaccacacagcaacataggtagttttatatacattttatagctaagcccagcagcccaaaaagctaaatgacttcagcgcccacagatactcctggatgagaggggattggaaaccaggtctgttcaattgcaaatcccctcttgtgccttttacaggtcagatgattttgtttttataggctctagcaggtcccttctctttgcgtcaccagagaggaagatcccctaagacaaagcattccctgtagtttttagcataactagtactggctcagtaagtatccactggggttcggaatacaactgccctgcctcttgagcagccatgcctgcttccgaggtggtgctgcatgctattcaggaggacagaccatggatggaaatcctgagccacaactccttagcctcatgacattgggcagatgactgagcttgtctgagttacaataaataaaaataccatgctgaatgatggcctagcatgacattgggaagtacagactttgcaggcaggcccctgggttcaattcctgcccctgtcattgagtaaagtaattatcataactttggaacaaattgacctctctaagcctcagtttattcttcagctaaatgaggatgattgataatcaaaactattttatagggcttgggggagcatcaaatgaaataacacatataaaaggcttggtttaatctctgaagcacattggcacttaataaatgttaactataattatattaacacctattttacagggttgctatgaggatatcatgagataatatgtatgaagaacctagcacactgtttggtgcatgtgagggttctgtaaatgttacccattttattccttaatttcctttatagacccctttccctgcaacacccagtagtctggcttctatcctgacaatgttagtgaagttgcttgcttgaaatttaccaggccaggcttatggctgtaatcccagaaactcaagaagctgaggcaggagaatccctatggtctcttgagtccaggagtttgagaccagcctgggcaagatagcaaaatactatctctacaaaaaaatgaaaaaaaaaaaaaaaaaaagcctgtcatagtggtacatgcctatagtcttagctattcaggaggctgaggtgggaggatcgcttgagcccaggaatttgaggttgcagtgagctatcattgtgtcactacacttcaccctggatctggaaggaagggaggaaaggaggaagggagggaaggaggaatttactagaaacaaattaacttctgtaatcctaagtacttgttaaggcagaaaaacgcagataagaaaatcgaagttgagggcaaggagctcatctttcacggtcatagacctcagttgcaacatctggaaaaagagctggttgggcatgccgggcaggcttttgtgacaatgtaagagcaagtgaagattgcatctcagtatgagacaccgtaagagcttgataaatggtggaccctctgatgttgacaacatgatgtcaaagatggtgtttgctgttgtttcaaatgtcttatttcaaattcccaattagtttcttcatgccataagggcaaaatccacatctcatactttttcaggatctgctctcacttccccaaacatgtaataccaccctggtcttcaagtccactctcaaaaaaaaaaaaaaatttggcctttggcctcgtgaccaccaaatctgatttccatccaagaggcaacattgtttgtgcttagaaggaattcctggctgggcatgatggttcacgcctgtaatcccagcgctttgggaggccgaggcaggcggatcacctaaggtcgggagttcgagaccagtctgatcaacatggagaaaccctgtcgttactaaaaatacaaaattagccaggcatggtggcacatgcctgtaatcccagctacttgggaggctgaggcaggagagtcgcttgaacttgggaggcagaggttgccgtgagctgagatcatgtcattgtactccagcctgggcaacaacagcaaaactctgtctcaaaaaaaaaaaagaagaagaagaagtaattcctaacagtctggaatctctagggtctctggtattatcctttagtttaagcctcacatttttctaaacattttgaaatctggtgtaatggcgttagatgaccaagaatttatagtcaaaagtagataaagtaaaagagtgaaaacagagacatgatacgagttgatgataccgtatgcaacttgtcaaacacttacatttgtgaataagaaaactggggtctatttggtggtttatttcagagatgttggatcaaatcagacatcagaaaagacaacagtaccaaacgaagatatctttgctgtatttgcagttttctctcttattaacatgaaaacaccttacatagatggaaacatctaaaggctattttttattttattttccattacttcactctaatgctttcacccgtacctgtggaaattagactgtcacctgcttttagcatcctgttttctttcgtgtttgtaatgaagccctccgggaattatgcgattacaaaaatgagttacaaatcctcattcggtatacgaaagtatatagctgctttccttctctgtttaaatagtctacaaaacaagaaataattagtcaagcactatcggtaattaagcacataagatgaacattaaacaaactgcaatcttgcatcattttgaaggtagataggcaggtttttgcatttggaatccagccaaaatgcccatcttcattccctttgctccttatttattattggtgagggaattcacttgccgaacttgctgatgtactcttgctggcggtccatctgagagttcacataagtgtgagtgactattttttgacaacactacctttgggagaagatggtttcaaagaactaactgtatcaaatggaaagacaatgtgttttcccaacatgggagtatgtttctaagttgggatcagttcacgattcagagaaatgctctgccttcttgtctatgatatcagatcaggtcagacgtaggtataagaccctgactcctgttttccaagcacttttttttttcattatgagtctatctttcggtcccctaaagcttctggtaattttttttcttttttttttttttttttgagacaaagtctcgccctgttgccaggctggagtgtggtggcaggatcacggctcactgcaacctttgcctcctgggcgcaagtgatcctcctacctcagcctcccaagggagctgggaccacaggggcacaccaccatgcctgcccaatttttgttgttgttgtattttttggtacagatgggattttgccatgttgcccaggctggtctcaaaactcctgggctcaagcgattcacgtgcctcagcctcccaaagtgctagggttacaggcatgagccactgtgcctggccctggtaaaattttgtctacatagttactgctgcccaggcaaaatctgaaaaatgttagtctaatttagttaagtttttcttgcagaccagaacttctaggaaactaatatacaggttttctccaaaatatattttcaaggaaaatcagagaataaaagtttccaatgcatttagactagaaaattaaatattcaacaaacaatttcggagggccaactatttgccaggatccttgctggaatagtctctaacctcaaggcaattgctgtctagctttaagatcaagagtaattgtgacttgatgtaaggtatctgtgttgctttgtattacattcttcttagctccattgtgttaaatacagatagacaatatttgtacatgataggttggctcaccattaatcacttaagaagtaatagaatgatcaatgattttctttctggcttgtctacgccaaaatggttcttctgctcagttggtttctatagtgattttatggatataggcattttcttctcgaattagaagaactgacagtccaggcacggtggctcatgcctgtaatcccagcactttggtaggccgaggtaggtggatcacttgaggtcaggagtttgagataatcctggccaacatggtgaaacctcatctttactactaaaaatacaaaaattaggtgggtgtggtggcgcatgcctgtaatcccagctactctgaaggctgaggcaggataattgcttgagcccgggagacggaggttgcagcgagccgagatcacaccactacattccagcctgggtgacagagcaagagtccatttacaaaacaaaaacaaagaactgacaataaatagttttctccgttttgtgacttatttttaattattaagaataagtgtcataaagccaatactttctaacatgtgtatagtatgttatagttttcaaagtctttgacaattatacctagggagccaggacagtatttgtatcatcatttcattgttcctggaaaacaggttcagagaagttaagcgacttgcccaaaatagcacagcaatctgacagagccaggattatcttccatcctctattttattacctgtgcctcccattaaatcatcctaagctccactacagctggagaaggttctgttaacacaccatacatctttttttttttttttaattgagatggggtctcactctgtcacccaggctggcgtgcattggtgggatctcagctcactgcaccctccttctcccaggttcaagtgatcctctctcctcgcctcccgagtagcctcccgagtagctgggattacaggtatgtgctaccgtgcccagctaacttttgtatttttagtagagacaggggtttcaccttgctggccaggctggccttgtatttctgacctcaagtgatccacccgcttcagcctcttaaaattctgggattacaggcatgagccaccgcacccggttatacatcttaaatataaagtttttacaatgccaccatttaaaaaaaaaaaaaagggcattaatgcatttagcaaagacttcctgagtgtctgcttggtcgagtgacacaaactggaacagagcatagcctgtcttccaggaaccggcaccagcgatgtcgtaggctgagggagaagccacagaactgtgagtgacatgtttctttggctgctcccgacacaaggaactgcaactaaattgaaggcttgaggacaggaagcaccttagcggttcgcctttcatttgagtgggcccagggtccagaaaagggtagatattcaggaagaattgatcaccttttggatgccaccacacatgcctaggcacaaaataactcagaaaacagtgataaaagttgtgattgtggttgttgtggaaattaaagtagcctcccctcttaagctttgtgaacttcagcaagctcctgaacccatctggaccctctctctcatcagtaacgcagtaacgtagagatgaaaccctaaatgccatccggtgacatcctggattagaccctgaatcagaaaaaggactgtagtgggaaactcgtgaaatcctaaatacagtctgtcatttacttaatagtaacataccattttcataagcataccatgggctgggcatggtggcttatgcccgaaatcccagcattgcgggaggctgaggcaagctgatcacttgaggtcaggagttcgagaccagcctggcgaacatggcaaaaccccatctctactaaaaatacaaaaattacctgagtgtggtggtgcccacctgtaatcccagctactcaggaggctgaagcaggagaattgcttgaatccaggagatggaggttgcagtgagttgagatcatgctactgtactccagcctgggcaacagagcaagactctgtctcaaaaaaaaaaaagaaaaaaaaagtaatgcaataagcgtaccatggtcatgtgagatgttgacattaggggaaagacaataaacagcgtggaggaactctgtgtactctgtttgtaagtttcctgtaatactaatattctaaactaaaaagataatttaaagggaaagaaaacctctttatgatagtaacatcagttggtataaccattttggaagacttgatttacataggatcaaatataagtatatctgatcccctagaaatttcacttctggccaggcgtggtggctcatgcctgtaattccagcactttgggaggccgaggcaggcagattgcttgagcccgggagttcaagaccagctgggccaacatggtgaaaccctgtctctacaaaaatattagtcaggcatagtggcgtatgcctgtagtcctagttactcgggaggctgaagcaggaggatcacctgagcccagggaggtcaaggctacagtgagctgtgattaggtccctgcactccagcttgggtgacagagtgagaccctgtctccaaaaaaaaaaaaaaaaaaaacaaaagaccatttttaagactatgactggtcaaaatgtgctcatacatttgccaaaagacaagtacaagagtgtgtttagcagcattattcattataacacactgaatcattattcatgattactcaagacatctggtaaaccacccagatatctatcagtggtggaatggataaataagttgtaataaatccacacaagaggagactactcaccaacaagaatgaatgacttagaactaaattcaacaatgtggatttatcttacagagatgatgttgagagaaaggaggaagatacagaggaatgtatcctatgtgattatagttacaatgagttgactaaaaagcaaactattcctattagaagtcagggtagaggatggatgggagcatgaagtgtcctccgtcatgttgctaatgttctgttgcttgttcaagctactgggtgtgttcagtttatgaaaattcatttaatgacacatgtatgttttgtgaatttttttgcatgtatattttactctaacaaaaagttcatggacaaatacaaaatcatatctgacagttgttgagagaattaaaggaaataataataatataaagcacaatcaatgcattccatttattcttctgcttttcccatcaattcatgttacccagtcattaatgcataccctctgagaccccaccaagccatctagccctcagctgtgtcactgggcagttgtttcttccactgtgcagtgtttcgttcttaaccaacatggcaccccaggttcagtggtgagagtgtcactggcaacttctgaaataacatctctgttagtttgtggagtgggctaaatggccagcccttctacgagctccctcatggttgcgggggactaccaatcactctctactttttttttttttttttaataggtcttgtcatttgtaaatgcagaaggaacactgaaaaaaaaaatactcttgccttcttccatctgtattttctttactaaattatccagtcttataaatatttgaataacatttggtcagtataaaatctttcctgtcagctcagtacaagaacactttttggctcctgagaccacaacagtcagataaattaatattgatttgttagaaaatagttttcactctgtctaaacatcttattctgggctcttgaaccaaaattatgaatttaaaagcagcaaaatagttcttcacagttttcccagtgaaactaattatgggcagattgtgagaaatgtgttggatgtgatttccaacatagagttctgctaaccaaaattcagagaaactagagcctcagtctctgatttatttgagcaagttgcaatttggtagactggagaatttatgtaaatagtttttgcagtttccatagggataactcaatacattaatatctcacgaatggcagaagatgaagggggaaagttttttttttaactgatagtttgatttacctaatagaaggatcggattcttcccccttcttacttaagtctatatattaaagaacagctggcttacctgctgtataaatatgcagtgtgtagaatttgactcagtttagagttgagttttaatcacatccacgtacagggatggggatggaattttttttttttttttttgagacagagttttgctctgttgcccaggctggagtgcagtagcaccatcttggcttgctgcaacctctgcctcccaagttcaagcaattctcccacctcagcatcctgagtagctgggattacaggtgctcgccaccacaccaggctaatttttgtatatttagtagagacggggtgtcaccatgttggccaggcaggtcttgaagtcctgaccttaagtgatccaccctcctcggcctcccaaagtgctcggattacaggcatgaaccactgcgcctgactgtacttttttttttttaaagtatacccatacccattgtacacatttggtattttttctttaaaaaaaaaaagcatttactttttgcctcatgaatctctgagtacattttgtgcattctgtattctactttatttactcaatattaattatatgagaaataaatcctaaatgtaattttgaatggtggcttcacaaaagaacatttcctcttcttttggacatttgctcccaattttaaataacacatcattgaacatctctgtacaaaattccgtatctgatcttcagagaagttttaagatagatgtctagaatttcatctcacatctaaactgttttaagacacttggtacacattgatatgtattgtccaattgctttccagaaactatataaaatattacaaagaaaaacatatatatatatatatatgtaaaatatatatatgaagggagaaataaatgtaaatgaaaagaaaaacatatagagaaagaatatgtctaaaagaaactgcagaggcagctataattaaagcacaaggaaaggctatgaaattctggttccacctgcaacagctgtatggtaaaaagcttattcagagtccttccttcttggaaagctttgttagagtcttatgggattgtgatgcacagatacaggggcaaggctactttttcctcgaactagttcaccaaagcttctatcctatgaaagtgaatataaaattcttaaagtttatagggtctgctgggtttaaggaggagaaatttgagttttcatattgtcagtctcaaaccttttctgaaattggaagtgatgaagtgacagtctggctatatgtgtgtgtgtgtggtgtgtgtgtgtgtgtgtgtgtgtgtgtgtgtgtgtgtgtgtgtgtgtgtgtgtgtgtatacctagtctagggctaggtttgggaactattttctcccgtaagttaaactgaactagactgtatgtcaaaaaagagtctcaatgtcaacttaatccattgtcatgactgtaaaatgctatttcattataccagcaattcccctgtggatttctcctgactctctatgcagcccaactctattttaatctgttgtagcttttctttcccctctctcccaactccccacgttttggaattattcagtgcattcgcttccaaggcacctgtttgatatttacacaaattatgaaagtaaggtgggaaggcaatgaaggcaacaaagtatataaaacacacacacacacacacacacacacacacacacacacacacacacacacaagaaatgactacagacacctcaacacccttccaaaacacttgaatcattttcttcgggagttgaacaagtggctgaaaatgccaaaatccatcagccaatgtgtaagtacaaaagggtcagataagatatatgtggattccataaaatagtgcatttgaattcccccaggtcttttaaagatagtggttttccagatgtgacaaaacaaaagaagatttccaaatcaaaattcccatttgcctttcgggatgttgaattttctccacatttgtgcaattaagagttttgctgagtgagcttaggactctgtctctttaagtgtttaacagtaattggttcatgtcctggtgttcattgaaaatcctagacatttcatgtaaaatcttcttaatgaggggatgaatttttcattcacattagaaagctcactctgacaaacaatttctaaataaaactttggcgacatgacatcccacattggacttgtcagagaggacaggtgcattagaatataactgtatggcgatccttcaagctgtcagccatgaatattttatttcttaatgaatcatctttgtgaaatcaactttcttgttgtagtgtcagtgccatttacaacaaaaagctggctccttttaaaaggtgagctccttaaagatgctgattcctgcataaaatgtttaaccctacccaaggtgttgggcaactgggggctttgtgctttgcttctcccttctgaaagtgacttgagaacccactttgggctagtgtgattacagtgaggagaaagctttccttgatttgttgtttccttctcagaactgaaatcccaggtacctgcccagaggcagctcccttggcccttgggtccctgttgttccaggtgttactcctattctttttgtagttgtctagggatttagtttctcacatcctgaggtccactaggtgctattagctggtgctaactgacagctctaggcagaaagcctttctcaggatcccagcttccctgtcttccagaactcaaagacggcttttgtttgttagttttgaggatggagacagctgtcattctaatgaggacttaaatgtgtccctgctgaccgagccagaacttatttttatgttgccactaggagtcttctgagatgctcttgtggctggatgtagaatccctttgctcatctctagacacagactagacaacgaaatacattcccctaaaatagcccagggttagttctatgacctttgtcactgttggtacagttctaagaggatattgattttttttttctttttaattcatagtctcaactatgtctcaagactgcccagcagtatttctgtttactcgatctaatttctcttccattcctcacagtggcaatttcaagcttctcctttttccccaagccccataatctccccctgatgcccttagaaagcttccctggtcagtcctcctcaccacctccagctccccctagaaactgaccatttatcccatcccggctgacttcttcccttttacaagaagatgtctctctttgaattcaactcagaggtcagcttcactgcctgccctgtggagtcgactctgtgtcccacccttcaggaatacggcttaataataagatgataaggattcgtaccagggattggcaaatgacagtcattttctgtttccttaagtaaaattttattaaaatacagctccactcattcatttatatattgttcatatctaattattttcacactgcaatggtgcatagtcaaatgctttctatctggctttttaagaagatctttgtccctcccccaccccccgccccgatttatactatggatcagcagcctaaaccctgcaaactgggtcccccatctaagagtctgcaatgaaacgcgagccgacttgatgtgtctcagagtgatcattcttgcccttggcggttgatgctagactgttgcagcttcaaatataatgtattttagtgctatacgacagccataagtattggcctgtgtccactggtctccactaggagaaaaccgagccaagcttgaaagtactaagcgtgcccaggggaaatggaataagctagaaatttgttgtttccttttcactaggtttaagtgagaatatttgtgagcaaactctcagtgtgggcaggtgacaatttctgcaggtattttccccccattttaacttgtgcgatatagttccctattttgttttgttccgcctcgatcacaacagctgccacccgaggtttaaagatactgttgtcctcatcttcagaacaagggttacgtttgctgtatctggagaaagtccatagtttatgatgaattttctattaatgtaaactcccactgtttataagtcacccaaattgttggtattaaattagatgtgtaccatcttatgtctcttctttcagaaaatgaatctctgtttttttttctctttctcctaaatgttaggaattttctgaagtttgaaaccaagtggcacaaaaacattgcatttattacataattgctcctagggaaatacacatacacacacatgtacacacatacacatacacacattttttcctaaacaacatcaatgtcataacagttttgaagcacatatacacactgacacatagattttgtaaatgaggcacatctattcttgaaatgcaattgcttaaaaatggaagttctgaaaataaataaaaagaaacatcaataaataaaagccccattttcatattcttatttgacctcttgcctctccatcattcttaaatttgacctccatcattcttaaatttgacctccatcattcttaaatttgacctccatcattcttaatcctcatgttcttaatggacatccctcccaccctatctgggccttctgagactgttcccccagccccagtcaggagggcttgtccacaagttgctgtctgaactgggcaagcctcctggcttccctgaaatggtgctgatgtcttcacttcctgccaccttggcaacctttgtagttgctctctttttgccaggggaacaaattaagagagagaagagtgatagtgtctacatgtggtctgctcactcagccagtattttccacagccagtctttccctagaccagcatctgagcgtgccttgtctatgggccacctatactattatttactgatgacttcctcattcactttctgttttttatctaaatgccagccttagccttgttcaaggtaacagtatacaggaaatcatgggtttcgagcatgttttgtcaatatttagtaaaatgcgttcatagctattattataaagactttaggtacattcctgcaccacttaataactgaatcaatctcctttcatcagggggaacaaacctgtctttggctcacactgtttgaggatataaaaggaagcatacagtgggcctcattctgacaaatttttagtaaatcacaggttgcctttcctaaatccctcaatatgatggctagtctgtttcatagtgaataaaaagtgatcctggatgaatgaataaagtgaaattcagataatttttctcaaaactgaaattgtttaaatcttcctttagttctcttttttctgcctgccccttctttcatataccctgtttttcacctcttttgtctcagtcccatctgatatttgaataacaatatgtaatttcaggtttaggattgttgatctgtaaatctcagcctagtgctttcaactcctggctttctcctaagttcaccctcctcccttccctcctttctgtaaggactctaaacgattgcgcttcattaagttatttttataatgagttcctgttaccagggaatacagagttaaaaaggtgatctcactaaaagtaattagcataagacctgctggacctgtagaagtgactggatggtaatcaatagcaatatgattacacccatgcagcaattataaattatttaaaacactacccctaggttactgactagttgcctttaaattaaattctctgtcgataattgatgcaaagaattaatgtgagaacaccttcagttactgcaactttttcaaggtggcataaaatattgaactattgcccgtcattagcagctaagctgtctgtttgctctaacatccttcttttctaaattggtcaagaaagagtctcagatcttgaaagatgacaaatgatttcgaatccactgctgggtattcttctaagagcactgaaatgtcccagtgagaaatttcatatatgaaggcaaaggaaaaaaaaattaaactttaaataatgaccagttatacttcatcaactctaacaaatgaaggagcagagttggttttccggagtttgcttcagttctttgatatggtcagtgtaggtcggggaggtcttccctagcttgagaaatcataacctaggatatttaagctgtcagtaatagtgttttaaaactccaggcctataataaagtaaaaagtgtgtctgataaaatgggtttttttccttgcttagtgaatgtcttctgtttctcgctaaacattgtcacttgccaaaccatgttttctgtttcatactaattttctactggcagtgagaccagcggaatctaagaaattgcatacgaaattcaaggattggaaagaagaagaggaagtcaaccattagcaaccctagctcctctttaatctcaagaggcaagaggtactcgatgaaccacatgctaaaataaaaaaaaatgaaccacatgctaaaatcaaatggcttctgcacctgtgtgcgttcctggactctggggtcacaggatggctgatgagatgccttcgagaaattaatactctaatgagggaaacatcctttcatgttggtgcaagagacgttctaggcctggttctacctctagttggaacggtggtcatggacaggtcacccccgctgtccagaacacatgtcaagaagtgggagctggacgacaacattcttgttcagagcgttcttcctccacattttatccaaagcagctccacttttacctgtgttatctactgagattctgcgtgtgtgaaacacaaggtcacctgccaaaagcaaaacaattaggccagcattgggctaggtgaggatccattgtcttttgggcaggtgattgtgatactataggagccggtgtcctgttgatggcatcccacaactttctaacctctgttgtagagttttgttagccacgatttggaccaacctgcagttaggccaagggctgctgatccaattggattaaggaactctgctgtttgagcatgttggcttcattcattggtatctcctacgccaagtcctaggcttggttacaaagggcaatgaagggtcttttctgtccttaagcactcacaggtagcttaacagtaatgccttggattccttccttcaagagcgacagcaggaagcccagcttctctggtagcagagcaggggtcctcaaagcagaccgtgaggtcagaggagcactggagtcaggagtttccatctccaccctgctgagtaaactgtagttacccacacagaaaaggaggctctccaggctgacagggtcacaaagacacacgactatgagatggaatgactatagctagaaaaaaaaaaaagtggggatgcccctcttgaccatcttatgcctgaaataagggaagacattcttcttttttatctgccaacctcccagtgccacagtaagcacagagtcaggcctcgaaaaataccagtcctttcgcctgtcccctctcacatggtttgaatccaagaggctgtcataccaggctcccccattcagtatattttctttatgtttaaatagtttggattgacttctcttttcttttatttttctgttgctacttaggaaaccatctccaggctagaacaagtgcctgaaatagagaagggtgaggtcactgcctaagacacttcctcctccacccactcctctctcagactcagctccttccacttctgcccacatggctgccattttaatttttgcttaaatgttgcagccaatatttcatgtattgttgttttcttccttgcctgggagactcttttgtctgaggttccctggtattttccaggggcccttctagcacttctgtgaactcattagcttccccttgttccagaaaatgtctgtcatacattacgtgcctttctctgtctttccctgcccctctcaccttcatcgatcacacttttgcttcacagaggtaagaggaaatcacactcacacagtatcttttgttttctagcaagctagaacacaagattttctagatgcatcttttgagttgatatgcaatattttccttgacagatttgttaccagctgagcagatattgtgtctgtgatgtatttgagtaccaggtatccctgattaccatagagtaatgtcttttattgaggcttttattattattattattattattattattatattttgagacagggtcttgctttcttgcccaggaaggagtgcaatagtgtagtcatggctcactgcagccttgacctcctgggctcaagcaatcctcccacctcagcctcctgaatagctggagctacaggcaagtgtactgtggcaattgttaatgttcacttttatttccatagttagccttgatcgtttagttttaaagagttatacaacacatacacacacatctaattgttgtgttattgggttaatgggaatattttagactcaagcctggttctttgcttctctccagcacagcaaaggatacacctccaagtataatattgaacttcaaagttagtaatgttcagtgatgcttaagcatgtagatcataaagtcctagactattttttgtctaaattattgtttgtagtcagcctctctactggttggaaacacaggcttgagtttggctttctgctctacctagttcattgctgcagctgtaatccagcctgattctaattttcaactggagatggttgtcttcttttttattccatgaaacaaattgattaatgtgtcgagggagcaaggtggtacttatacctacccagcctgcttgtgtgtgtctcaaggtggagagaggctgtggaaacaatagagagaatagcatggaaggccacgttgcaattaaacaagattgggaaagaagacgggactaaaatcatgccttgaagatgtttatcatatgaagttgaccttgagaccccaagaccggcttcagttttccacaatgcggctattatgagaaaaacagtgactaactgagcactgtgcataactcagttctcggaattttcaatcagaaattatctgatgacgggactaattcttattacgatagttccaatggatccacccaggatccacctccacaactaggtgtacagaagctggagatcccatcatgccgccgggcaccggtttacgagaactctatgtcttatcttggtagtacgattaggaaaacaaacacaatggtttctgccttcaatgtttccatggtgagggcagttattaggcatatgctaaagtgtaatatccgctttttcaaaccacatttcaaagttgatagcatcaacggctttaaaatcacttttaaagaatctgggcttacccagttaacagaaatagaacctgcctgtttatcagtgggtttgcctcacttttctgtgggtttcttttcttttcttaattatgcattaagaaaataacttaagtttctgtgcatacaacatcttcctttctcattcccagtaccctagaaacacagccgttcactgaagaggatttgagtgttgtctcctctgtggggtcaaaacatcatgcttctttctgttctgccccatggcagtggtgacgatggcctagcttccatcccgtagcttcttgtgtttttctattccaccagtctatcaaccctgtatttgttgtcaaatttacactgtccacaggcaaagatctattctcctttagaatttaataggagggtttggaaatgatgccatggaaaccctgagcagcttggcaatgctgaccccaaatgagaaataactatcattggtgttttccttctactactattatcttgcccattgatcttcaaaaagttcattggtcaaattgattgaggaacgcaagacttaaatgtaatatggctctggcaaattctgagatgctaacaaaaacaagttttcttaagaacaatgtcaactgactcacagtatccgactatataaagtcgagtgctctcatgccaggaagctgatacagttcatgaaacctcagtcattctttcgtattactcctgtcttctctttggaaaacaatctcatgaatttggtcttgacgctgacttaacatcccaggaaacagatactcaattccactgtcttttttgagaaatgaacagttctcaaactttgtttaaatttccttttcacagatgagtaataaccaaagatatttctgaaagggctctgaaaacatgcaggcaattgatctttaaaaataagatagaaatagtaggttttataaaagaaggaaatagaaatacttcagaagaaataaagtgtgctgaatcatgttttaaacataattatatccggaatgcacttacccatttgaaaaaaaaaaaaagtcaccaagttgtttccaattgtttttgtaaatttgcttagtcattttcagagacaaaaatttgggaaaaggattgtagaatgactggcttcccaaaaccacttggtgtttacaaagttatcaaaaacgggctgggaccactgatggtaataacaaaacctggggccctgaatcgtgtattctacatccgttagcacactgaagccacaccgcaaacttgtgaggccagcgttgcttcccctaccccttccgtcaaaaaccgtctgaggctgatcattaacttgcataaggtcacatagctaatgagaagcaaacgcatcataatgacctgggacatatgacactgaagcctactctctttccacaaagcttgatgtactcagatagtaattagtaaacattttcataaataatcttaaccttttcaagcatttttgtcgattggattgtagcactcaaaagtaaggtctgttttactaatataaaattgggcctgtggaataattctcttcacagaagtgtgtgtgtgtgtgagagagagagaaaatgtatatgcatacatatacatatattattgagacataatttacataatttatgttctataaaattagcatattttaaatatacagttctctggattttgaaaaatgtatacgtgtacataatcatggatccaccaccccagttaagatatagaacattccagggccaggttcagtggatcatgcttgtaatcgcagcatgttgggaggctgaggagggtggaccacttgaggccaggagtttgagatcagtctgggcaacagggtgaaaccccgcctccactaaaaatacaaaaaaaagaaaaaaaaaaagaaaaaaatagctggccattgtgacatatgcctgtaaccgtagctactctggtggctgaggcttgagtatcgcctgggaggcagaggttgcagtgagccaagatggcactgctgcactctagcctgggtgacagtgagactgtctttaaaaaaaaaaaaaaaaaaaaaaaaaaccaaaaaaacaaaaacaagaacattcccatcacgtcggtaagtatctcattctcctttccaataaatccttttattcccagaaacaagcattcttgtttcaatcattgtaactttgttttacctgttctagaacttcatttaatagaaatcatacctactgctttgtatgtgtcgtcttctgcttaatgattcacataatgtttttgtgattcatccatgttgatgggtgtattaggggttctctttttcaatgctggatagtatcctgtggtgaaaatacaccacaattcgcttatctgtgcacctgttgatgagcattgggttgtttatatttgttggctattatgaataaagctaccacgaatattcataaatcctgtatacatgtttttatgcccttatgtttttatgtatttttgataaatacctaggtgtgaaattattgactcttagtgtttaacttgtaagaatgctgccaaacagttgtctaaagtaattgtatcattttaaccccccgctagaagtgtgtaagagtttatgttgcttcacatcctcatcagcactttgtaatttcagtctttttaattatagcctttttgtgggtgagaaacgctatctcttgctagttttattttgcattttcctagtgactaatgcctctttttatgaactcattggccgttcatatattttctttctgtgaactgcttgtttatgtattggccattttctaaaaattagatagtctttttaatattgaattataggaattctatatatattttggatacattctttttttttcatatgtactgtgaattttctcctttgtcttgtctatttattccttaatggtgtcttttgaaaagcagaagttataaatactgatagtgtccaatttatctttttcatttgtgtagtgctttcttgttctaagaacctttaccaatcaccaggtcacaaaaatattttcctatgttttcttctagacactccataacttcaatctttacattcagatctatgttccatctcaaattaatttttgtatatggtgtgaggtaatggtagaggtttatttttctctccataagactctccaattgttctagcactatttgttcaaagactaatcctcgcgctattcaatttccttggcatctttgtcaaaaatcagttgactatatatgtgtgggtgtatttctagactgttgtactccattgatctaattttttttcttatacttactgctcgattgcctggaagctaggtaataataaggattcaaactttgttctttatttcaagattgtttgggttagtttagatactttccttttacatatatatttcctgatcagcttctccatttcttttaaaaagccttgctgggagtttatttgctttggtattgaatctcttgatcaatttgaggaggatcaaaatcctgaaagtgttaagcgttaccatccatgagcatgcatctctccatttatttaaggcttctttatttataaacatttcagtgatatttgatgattttgaatgtggaggtcttatacttttttgttaaattaactcttacacatttgatttttttatgctattgtaaatggcattataaaatttcttttttccaactgtttgtttctaatatatagaaatacagttgattctagcaaactgctctcatatcctgtgatcttaaaatttatttattcaccttttcctttttgttaaatagattctgtagaattctctacatctctgaatatagttttacttcttctccaatttttatggcttttgtttctttttcttgttttaatgcactggctatagcctgtaggacagtgttgaacagaggttttgagacagacatcattgctttattcaggacttctctattatatgtgatgctagttgtatgttttctgtacctatacttcattagattaaggagtttgaatttatttctagtttgctgagagttcttttataaatgtgttcatatatatatgttttatatttttcttattcttactatctgcatattagagggagtttagctcattggttaaaaggatttgttccggaaacctaactccaaatctttgaacttcctagaaacctggcctgtttatttaccccgtatgtcactttcctttatctgtaactggaaaatgtgtacgaagagcttaatacaatgactgatacacagtgagttctccataaatgttagttattattttaatattacagcatctgtggaaacagtgggtttatatttcagcgtcctgagaaacactcatcctgaacaacgggaacattggccacatccgccattgtcaattttaaataaaagatatgatgactagttggtgagttgatcttgtaagacttttacagatacccagaacggctctacttcttcatattccactttttagttttaaaagtttaaggagatctctgtgatccctgaagaattgtgtgcaaagcagcattaagacgaaaatcttttatatttgtgttgtagcttggaaaactagcgcgtggtctgttttgttccactggctcctaaggttcaggtattaacataaatacagcccattaacacttgttcctctctgtcaggacataaattaagtctgcaggtgttccatgaagctgtacccttggtactaattaagccttgataattaggtttgttaaattcaggactttaagcttatattccctccttgggctaccaaaacggagatgtgcaatatacaagccctcctgacttttttttttttttttttttttcctgcagagagcgttgctgctccttctctattttatttctttattactgtttttttaaatgaaggagtcagtaacaaaccgttcatcattttgccagagtagggtgtaaaccttcatgcagacctgtacatttgtttatgacgagattaaagtcttttctcctcctgttttgtgtcagctcagacactgaaggggaaagtttccagcctggtttctccatacactgaacatgttgaaatctatgccttaagcccaaatgagctgtcactcaagtatgcacgctcatattattaaaaactgtgcatgtaatttgctgggcacccaaataatttgttttttatttttccttaaaaatgagactttctgttaggaaagtgattcatgaaacagtgaagatcctgcctcacaactttcaagaaacccacagaggtccctattcacataagaattttctaagcagaggttccaatttggatatttcgtggccttcaggttatttgtaaccagtacacaaaccacaaagtcataatcagatagattttctttccagcctgtctttcctctttggttgctttgtaaatctattactcatcagatcatatgtttggcaaatgccacttttcattttgaatcaatggaatcataaaaaacaattctactagtaccactttcaagaatattcatagtggtcatgctaacgtaataacctctcttttttatttgaaggatattaaataaaattgtacttttaatcagagcctttttttgaaaaaaaaaaaaaagaaaaagatagttgatattgtgggagatggctacaatacagattcatcccatattctctttaatgttctattcccaagaagagcactaattaatctctctagaagggtaccacagtttccatgagcgttcatattttgaagtttccaagaacatgttctacagaatggaccactgctctcttttcagacccaacccttgtatcagagtttgcacacatctagaagttccggttctcccagtcattacctttctccttcaagctgggattcagagtccattttcatagggcaaaatgcagagttcgggttccttcctatccatgagagtaggtgctgaaggagataaaggaatgaagacatagactttgaaagcaatagtctggcaatcatccaaaggtttgtgggaggacaaaagatcacaaagtatgtgtttgtgaaaataagactatgtcatgaaagctttagaatatccaacacattatagaatattttcacggaaatatttcggatggaattttggctttaattctttctctttttttcctgttcttttccctctccccacaaccacttctgtttcattttctgttttgctccttcttttcataagtagctggtagtcagtgttctctttttcttcctgtgagacaggatctccctctgttgcccaggctcgagtacattggtaggatcttggttcactgcagcctgtgcttcccagactcaagtcatcctcccacctcagcctcctgagtaactaggaccacaggcatgggccaccacgctgggttagtttttgtatttttttgtagtaacacggttttttcatgttgcccaggctggtcttgaactcctgtgcttaagcgatccacctgccatggtctcccaaagtgctgggattacaggcgtgagccactgcgcctagcgaggtagtcagtgttctaaacactggtgtacaatccaagtctgtcgctgcccaggatagaggagggatgacgtgaattcacacgggcctctcctacaaatctgagtgtacatcaagtgaggggcgtccctccgcacctcactgttgggctgatcaatcccattcccactccattatgtgtgtatttctaagtggcagatttgccttaggaaatggaagaaggggatgaaatagtgaccaacacaaattactgggttggcgggagttgagagctggcaaaatcgtcttggagaaggaaatggtgcagatttcagagctggcagacagcatctacatccacctctgcaggaagcaagggaaacatttttcttctggagaatcgggcagcctgcagctgatccggtggtgtctgaaaccatcctgtgtgctgtagtgtcaacaacttagcctggttactttgccaccaaaccccaccaaatgcctttgtatctttttcagaactgcatctctgcagcataattgatattacaggaatgaaaagtgttctgaggcatattattcccagggtaaagagtcaccgctgattaattacctcaaggacaaggggacggtgactttttctcttgtatccagcagcgccacgcggggcgggcgggagaggcaaggctaagaggtggatgaaaggctagggttaaggcatttcacaatgtcaggcatcttgttagactgcggctttccaggccttcccccgtgactgctgcgggggcctaggccaaagatatgcccgagtagaaaatctgacaccagcttcccagttttctcttctgctctctttggctgcaacgcttttaccatgggtaaaccattaggccggctctgcagggagggcaagaccacagcagctcagtatttcctgctcagggaaaaaggccaggtcttttgttggtggaaatccacttttccatccactgtcttctaagaatgaaagtaaatctgttgtgctttcctctgccctgtcctcaggcttagccttagtgggcctggtttttgcccccctccagttttagcttcccatctaaaatacaagggaaaagacagcaaggacaggacacttcctcctagtgtcttgtaaagctgcaagggagtcgcggctgagtcgaggatccacattcctggatgagtccttttgttaccagcggagggtgtccgggttcttggcattttgaagaaatagttggacaaaatgcacaaacaaagcaagagaagaatgaagcaacaaaagctgaggtttattgaaagcaaaactacactccatagagtgggaacggcccaagcagccactcaggggccctggatagagaatcttctggagtctaaatactccctagatgtttcccattggccacttggggtacaccccttataaatgaagtggtggcctgcaatcagtcttattggttgcagaaagcaaccaatcagaggctgaagtgaagttacaaatatcacactcctatgcaaacatctgattggttttggaaagcaaccaatcagaggctaaagtgaaattacagagttgctcttttatgcaaacgaagactccgcctccagtcagtatgattggttgtgggcagcaacccatcagaggctgaagtgaagttacaaagttacactcctatgcaaacgtctgattggttgcaaaaagcaaaaccactcagaggtactttcaatttcccatctgccctgcagaaaaggtaaggggttgcaaaagagtagcccctcctccttttgttacttaggcgtggaaagttaagggtttcctttcagtttggttctaagaagtcagagtgaaatggctttagattccctgcctgcagattctattccccagcctcactttgagaagcacctggacacttcgctctaggcacgtgtcttcttcaagctgccatccattatgcatagtacaggagctcagaaaagtcacccgtgggttcctttctagctcaatcatgctgagagtccagtccatttataacataattcataaaggaacattctatttagttctcagaactctgtggcaggggactgttgttattcctcctttacagaggtgggtctgaaggtacagagtggataagtcattttctccgggccagccacacagcgaatgaatggagactccttgtgtgtagtaaatggctgcagccctataagctataatcatatatcatcaacacctttaccctgttattaacgtgtctgaaattagggaacaccacgtacaaaagggatcagggtccacctttctgaagaaaactgcagagcttttgcagttattaaactagcaacagatgtaaagtccaactgttagagtttttctttaaagcagaagttagcagttacaggtgcttgtgatgtcatcacttagatgatcttataaatgccttttttttttttttttttttttttagtcggagtctcactctgtcgccaggctggagtgcactggcatgatctcggctcactgcaacctctgcctcccgggttcaagcaattctcctgcctcagcgtcctgagtagctgggacaagaggagcacaccactgcgcccagctaatttttgtatttttagtagagatggggtttcagcatgttggccaggatggtcttcttctcttgaccttgtgatctgcctgccccagcctcccaaagtgctgggattacaggcatgagccaccggcctggccataaatgtcttttctgggtggggcatggtcactggaaatgtaaaccctcccttccccaggtcagcctgcctcccaggtgttggtgctatgattacagtgaccacataatttatcatccacactggcacctttttgagagaggttggggagcaggtaattatgctgggacaataggcgtatgtcaagatatctggtcaccctatctatgatctgtcacacttagtactttctaaaattctcgggcctttgcaccttctttttatcaacacttagttctatgttactgaatatttcttaattaagtgcaggaaagaaaataaccattttttctccttttaaagaagcacacacacctttcttttattggtattacattccttttcccagttggtgcccctgttggttttccaaattgtcttcccatccttatcctacctcccaatagagtacctcatcctatagtgttattataactacagaaaatatattttcattccttccacttcatgctttcagctagaaatgtgagtctctgagacttgtattcttggggtcacttaaaacatattgcataatgaggccttcaatgactctgatttggaactgaccctctatgaggggttatacccctggacaccaagctgctggcctgagcatgaggttgatggccaatctcaggagaggaggaggaagaggaggaggcggagaagaaaattgcgtgctaatttcagttgtatattgagcccacacatatttacttccaatatgaagcaaatctaagaaaaattctgctttaaagaaagaaatgtaaatcaagtgactgttgatggacgcttggaagaattcttatttatttatttttttggacaggctttcactctgtcagccaggctggagtgcaagtggcccaatcatggcttactgcagactcaacctcctgggtgcaagtaatcctcccacctcagcctcctgtgtagtggagaccataggcatgttccaccacacctagttaattttttattttttgtagaaatggggtctcaccatattgaccaggccggactcaaactccgagatgcacgtgaatctccagctgtggccccttccaaagtgctgggattagatgcatgagccacctggcccagccagaatccttccattaataaaaggatggaccatgaactcccttttatgatatgagccgatcaaatgtgagcagaatagtatcctatttatacaatgtagtttaaaaccaacttcttagaaccatgagctaagggggaatctggatttcaaatgctagttgcatcaaacacgtttccaccccctcaaaacgtggcccaaagtcattagtgtcggagcacccagccatccttggctccttcccacctatgttgattaattaaaggacccaagagctaaaagggagaagtagctgcatgcttgccacttagtaatattttgataagtatttttgggatgaatgcaatgatggatgaatgaatgaatgaatgaataacataggctacagtattttgtcttcttggttagggaccttgagtaaactgaggagtctgaggggaatgccatggaagtctgtaaacccaaaatcctcagcgaaacctcagccatctagggacatctggggcagcagagagccactggtgtggtgagttatctccctgggccttgagatagccatgctgttttgtctccacaaggaagaagtaggaggcatagcccaaggcagcttgagaggaaagcctcttggccttgaataagatgactttgttactgggcaaagaaagcccggctggaagtgctctttgatatgcaaatatagcctgataaggatttcctctccttcctactttccctccccaaccctcccccaagctaaaattctcttcccaggagccctgtcatcagcagggagttttctgtctttgtccccatctcttcacttgtgctgtgcaaaatcaggccacgattgcagggtagtccacggcttccaaagagaactgcataaatatacatctttcaggggaagagggagaacctggagaagtcaggagagcaaaaccatgccagtcagcttcagtgatgataaaggttactgttggatgaaagtttgcattttgttgtggtgtgggaaggaccttatcctgtcagctctatggatgtgcccagtttaagctctgaaagttcctttaacttgaaattgtttttgatcatgtgacaaggtcttctgaccctttatcacccacagtgttttattcatttgctctaaaccagcagtaggtgaagttaggaataatatgtcaagcttcctaactccatggtgctctcattgttgtgtgtgtgtgtctgtgaataaacacggaaataattacgcaaataagctattggcaggtggtgataacgtaaccgcccaatgggttcattctgcctgatgcccagataaagccgatttatctagacaggggaattgcaatagggaaagagtttaatgttggtagagccagctaaacgggagactggagctttattgttactcaaatcagctttcctgaaaattcagagactggggtttttttaaggatagttttgtggacaagagaatgggtactgctgatgggctgtggatgcaatcataggggtgtgtaaaacccttgtgccctgaatccgcttctgggtggggggcagggcacaggaccagttgaatggggatggggctaccagtcctcaaaaatgcaaaagccggaaaagacatttcagaaggccaaccttaggttctacaaagtgatgttatctgcaggaataattggggaaattgcaaatcttgtaacctctggaataatggctgctaatcgtttatgtccactctttagcagaattcaggctcctgtcctcctcctaacttggtggtcttttgctagctttacaaaggcagtttagtttgggggtagggccattatcatttaaattaagtactaaatatccccccaaagttagcttggcccaagcccaggaatgactaagggcggtctgaaggttaaaggcaagatggggctaggttagatcagatctctttcacggtcataattttcttactcttacaatttttgcaaaggcagttttaataactgctatttagcaaagacagttgggtaagttactagagggagtattaccttagatggggccaggagggtttctctgaggagatcccatttcaacagatctagaaatgtaatggagccagtcctagggaaacaggactaccaggaatcctcaccagccccgcaaagacgagggagcagcaagttccaaagcccgtggcatgtcaagggtcgatgaattcaccaactgcaaggggctttggtgaccccagtgaacagatgagaaaggggaggaggctgggatcagtgcacagctttgcaggctttgggaaggaatttcgagtttatctcatttgtccaggtatttggatgaagccctggcatactaaccgtatgaaagtttatagttcccaaattgcaggataacaaggctctgtaatcttcatttcctcaaagttttacaccaggattctatggccaagtgtgtggcagtgtcacaacttaagagccagtgtaattgcccaacgggttctccttgcccgctgcctaagcaaagccgatttatcaagacagggggattgccataaagaaagagtttaggtccaggcacggtggctcatgcctgtaatcccagcattttgggaggccaaggagggtggttcaactgaggtcaggagtttgagaccatcctggccaaggtggtgaaaccccatccctactaaagatactaatattagccaggcgtagtggtaggcgcctgtaatcctagctagtcgggaggcagaggcaggagaactgcttgaacctgggaggcagaggctgcagtgagtcgagatcacaccactgcactccagcctgggcgacagactgaaactctgtctcggaaaaaaaaaaaagagtttaattcatgcagagctggctgtgtgggagaccagagttttattattactcaaataagtctcccccaaaactcagggatagagatttttaaggagaatttagtgagaagagggtcagggaatggggagtattgattggtcaggtttgagatggaatcagggagttgaagctggcctcttgcactgagtcagttcctgggtgggagccacaagaccatatgagtcaatttattgacctgggtggtgccagctgatccatcaattgcagggtctgcaaagtatctaaagtactgatgttcggttttaccatagtgacattatcccctggagcaatttggggaggttcagaatcttgcagcctccggcagcatgactcctaaaccctaatttctaatcttgtggctaatttgttagtcctgcaaaggcagtctagtccccaggcaggaaggttgtttattttgggaaagggctgttatcatcttttgtttcaaagttaaaccgtaaactaagttcctctcaaagttagttagtcctacaaccaaatcaactttgaacaagacagcctggaggttagaagcaagatagagtcagttacatcagatctccatcaccttcataattttctccgttataatttttgcaaaggctgttttaataacagccagtcgttcatgtttccttgtgccacgtgattattttgtacagtcaacattaagagacaggcacttgtaaatgttgagatgccaagggggaaagaattttagaatccagatccgctttggtaagagtggccttcgagcctcatgtattctctgttcagctgttaagattgttattaaactttatggaccataaaccccacagaaacaaggaggttgaacaaccatgctattacacaagtgtcaaaacaggagctgtatttcatgtcctgaaaagtgtgcacggttggcctcctctaggtcccacgtgccttctggatggttttaaccctcagcctctctttggcctgtgagtgaaacccatcatttgacacagaggctttctggaaatgatgctcctcttagatgaaagttccctttcagaaatctttcattccctgacctctgtgtccatcccactaatatatttcttaccaggagtacatagtttgttctttaagcaaaaccatatgcatcgtattttaaatggaacagggaggttgttccatgcgtcaacttagtccaaatgtagagggtcaggaaaacagtgatatgagaaaagggccagttactgtctgggaatccataaatactgcttggcaaatggcacattgcatgcttattccttaggcatccgtttagcaaaataagatgtcaagctaattgtaatgatatttctggggtttcatcttctctccctggtacataaaagaatgcaattccacctatattttgatttaagatcaaatttttgcaaagtataattacatttgatgtaattgcccatgcaacccagatgtcatatatttatgttattattatcatttttcatgtgtagatgtggtgatcgtttgtgctttgttaaatattcctcgtctgtccttctggggatgatgctttttctccctttttggtcaggcatagataggtgacttgctttagccaaagaagcatgaactgtcacttcaagggggagatttacaagccagtgcaggtggattccctgctttctcctgacatcatgatcatggactcacatgacaaaatggatcctccatcttccagcatctctgattgagactaacaagggccctgacagccttttctggacttgtagtatgtgcaagaattaagctttttctgtatcaagtcaccgtgttatgggggttgttcctcactgcaggagaaccttgttcatccgtattagaacagtgtggtgtttcatgttagcagagtgtatcaggatcttttgtttttttttttttttaaattaaggatgctgtatgagtcttttctcatactactgagaaagacatacccaagactgagtaatttataaaggaaagaggtttaatggactcacaattccacatggcggtggaggtgtcaccattatggcagaaggcaaacaaggagcaaagtcacatcttacatggtggcaggcaagagaacttgtgcaggggaactcccctttataaaaccatcagatctcgtgggacttactcactatcacagaaacaacatggcaaagacccatccccatgattcagttacctctcaccgggtccctcccatgacgtgggaattatgggagctataattcaagatgagatttgggtggggacacagccaaaccatatcagatgcaaagttatgcatatgttgatcagctcaatttagcctttccatcatgtttacatatttcaaaataatgtgttgtgcacaatatatatgtgcaatttttgtcaattaaaaataaattaaaaaaattaaaaaatggctttcccacagcctgtcgacttccatccccatgtgtggctctccccagggcctcccttcttgttctccccagttgcagacctcagacaggagtctgcttgtcttcctaggcccttgtcagagtggaaggtggccctccaccacaccagcccactttccagttatcaaaaaggatctttgatttaatatttccagagcaattttggtgatttccattcaaatctgttttttgtcataactaccttgcttgcctatgggacatgttcccatttcagtgcatacttgacctttaccataaatcacatatttgtaaactgtaccctcctgctgttttattaggcatggagaagcagtcttttctttttcttgatggcctgggttgaccagatcctgacttttgtggagacattaaagtgctagaaatgataatggtgaaagattcagaagttgaaggagatataaggagagaaatggacaattcttttggtaattgaatgaaataagactcttaggaaaattctccccagtggcaatgttgtaagaaacaccaggccgggcacagtggctcacacctgtaatcccaacactttgggaagctgagacaggcagatcacttgaagtcaggagtttgagaccagcctggccaacatggttaaaccccatctctactaaaagtacaaaaattagccagacgtgatggtgcgtacctgtaatctcagctactcaggaggctgaggcaggagaatcacttgaacccgggaagcggaggttgcagggagctgagatcacgctgatgcattccagcctgggtgacagagcaggactccatctcaaaaagaaaaactcaacgaaacaccccagcttctatcattctcaagcttagtgtgtgcaagactcatggatgctgcttgttataaaggaagataaattatgaacaggcagactggtctgtgaaccttacccagaaaaatacacagtagtccagtatattggcctccagggcaaagctacctaggttctgagtccaattatggccttcatgagtcttgtttctttggacaggttttccagtgtctctgagcctcaacttcctcatgtataaagtggagatgatgccattacaggttgctgctttatggcacataattaatactagctcttatttataggaactgaacaaagccccagttgttttgaagcatgtcctatcattaacacaggtaatcaggatatattcattgaagtctcactgtgtgccaggcactatgctatgcaccttatgtgtgttattttatttcatccttccagctctgggaggtgatgactgtcatctgcattttgcacatgacaaatctgagggtcagagaacttgcccagggtcacacaattagtagatggcagctcaaggggtttttgcctgcgtcttcacccaaagccactaacacgggatctgtcaattgcattgctggtgatcaagaaatgccagctcctccgctcttccctgagtgccttgttggagacaaaaccagcagggttatatccccagcactgtaatttagtgtggcagtcaggggaaaacaccttgtagaatttcatttcttatcatttaatgtcccctttaattctcatttaagttcccctctgtaaaaggcagtcccttcagctctcataaaactttatggtctttacttgtgattaggcaatggtaaaattgattctctaaaaccaacttctagtcaagttatgtaattagccaataagggaggctgagagaggaagatatacaaggttctccctcaagaggtcagacgtattatcattggttagatgccgtatctttaaaacaccatcagcttggaaaacactatccattagcaagagatcagagcaagagaaacctcgaagggtcgaacggtccattctgagggctccacaaagaactcggcatcccagaaggatgattagccttccatctctcgagttgtctcagagcacaacaggtctgagtgtttttttctttaatgaattaaccctttggatttcagccctagcttttgcttcccacatctgacatcctgccctacctcctgccagaaaagattttgatttcgatcatggcagttgctgtcgctgaggtaatatgaggagatccgagacctcatccttgcagggagtgggcttgagataattctcgttacaagtttgcctagtgcttcacataagcagaggccccaagacatcagcaagcccgttttttgcctcttcctggttcatggttagactgcatttttgagcctctgcctgttaggtgcagccatgtgcctgagtcttggccaatggactgttggaagacgagacgttggccccttctcaacctgacctgtaaaaacctgtcttgcaaaaccctcacggctctttcccctgcagtcttgatgtgaacaagcatgatgatgttggaagccatacacaagctggatagagccagggtccctgagttcaccacccagagcaaagtcacttgtcgatcagaaatacagaactagttttggacttgatgtgagaaatcttttactgtatcatagtagcaagcattaccccaaccaatacctgtgctcatactgctacagttttttttttttctttttagtgactgggtcttgctatgttgcccagacttgggtgcaatggtgccatcatagctcactgcagcctccaactcctaggctgaagccatcctcccaccgtagcctcctgaatagctgggactaaagtgtgcaccacaatgcccagctaacttttgtattttttgtagatacggggtcttgctatgttgtccaggctggtctcaaagtcctggcctcaagtgatcctcctgccttggcctcccaaagtgcttggattatagacatgatccactgcacgtggcccatactgctattccagacaagaaattgtaccaggaaattcactgatattattggtccatctgaggatcatcagagatgaaaatgagatttgacaactgcatttggaaatggagtatgacagtatcattctgatgtagggaggatatcacctcacaggagtctttcctggctatcctgtccaaagtcactactcacaatttctctatcccataactctattttatttctctgtctagcacttatcactatctgatattttctgtctatccatccgtctattcattcattcattgctaatttattagtattgccttcccatgaactattagctgccagagagcagggacctcatctgtcctgtccactcatgtcttcagcacttagaacagtacctggcatataggatgagcttcagaaatatttgcaggtgagtgaatgagggagtgaatgaatgagggatttgcagcttgaacgctgtactttgaaacagttccagattcatgaaatttctttttaatgcagaagatttcttatgtgattaactgaatgggaattgatgctttgtggaatgaaatggattgagtacagagtgtgggatcaagaacttttaggcactgtgagtataagagggaaaccaggccgggagcagcggctcacacctgtaatcccagcactttgggaggcggaggcgggcagatcacgaggtcaggagatccagactatcctggctaacacggtgaaaccccgtctctactaaaaatacaaaaaattaactgggcatgctggcaggcgcctgtagtcccagctactctggaggctgaggcaggagaatggcgtgaacccaggaggcggagcttgcagtgagccaggatcgcgccactgcactcccgcccgggtgacagagcgagactccgcctcagaaaaaaaaaaaaaaaaaaaaaaaggaaccagatggccctgcccttgagcaggctgtggtctggcctggtggagagacagagaatcagttaattccagggtcatgtattaggtggtaagatagtggttcacaccaaaaacatagaaaatgatcacttagcctgatccacaagttcaggaaagggctctgagcaggagatggaagacctcttggctggttaaatggagatcaagtggcagcttggactcctgctgcaattaaaaaattactctccagttttcttcatgtgcctccccattcactccaccaccactcaccccaaatcagatcatgattcatttgggttgtaccgattaagagggttccctttacatgaccattccagtcatgaaacagagaatctggtcacctgtcctttatcttggctggtccaattccataagaagtaaatgctgtgtgtctgcgattcaaaagacccctttcacgggaggctgggagatttttccatctaaatagcttaattgttactctacagggcaatcataaatgtaaatcgacttaatatgacttgattgttagtaatgactgtccctctaatgacgctggccaatgagcctacacagaatgtcgcatgcagatcaatgagccaaatgttagcaggggactgggcatttgaagatttaaaaaaatgaaaaattgcactgtgacattgctggttcctattagcaaaataacagacagtgttatcagtcattgactcagaagatagtttcttaccgtttggggaaagtgcttgtctattcctctccaaagccatttaaaaaaaaaattgcaccagttctcatcccgtcatctgccttgatcaaacatttgcttattggaatcacttcgaaaaggaacttggtatcgttcacatgtgtttataactctcaaatcttcttcttccaatttttaatcttgatcaccacagctttataacaggaagaacgctcaaagaagaaaaatagaagaagcctgaattttaatttgctatttcttcacacacaaaacaccccaagctcaatcaatgcccagaaatgaaggccaatagatgatagtggggcctcagatttcccacctattgttttgaactctaattagggaaagggaatttggaaccattgtcttctctgagtgtgcagacacgatgctatcattgtgtttacagaggtggtcagattcccagcacagtgtactcccgcacagataaccgtcccatcttgataaaacaatgctctcagccgaatcctaaacacgctgcacaaggaagaccttatgctgacagtagggaggaagcgacatgttaacaaacaagtttgccggccaggaagttttaatcagcgctttctactgcagggggtatgatggatggagaccctgtttcagaggggtttcctttagataaaacaataataccatgctttcaagaagctcgttcgacagctgtaaagctatgattaatcccccaaaagtcaaacatgggaagactggcaagatgagattattcactgggtataattagccacaattatcgctaaagagaatttggggagattctgctctaaagggaaaagctttgtaaaggagaattaccagtagagtgaccttataatttaccatccaatggattttgaatacttctgagagagaaatgagatactgataataattataccaagacaacagacataaattgggattggcctagacgagcaaagatgaatggtcattctgtctgttagtaaaattccatcccaggcacaatatctcagacttgaaacaaaataaaagtgattctttctaggataaactctaaactaagtgtctgataaattctgggaaagtttatccaattgttacaacccagggtcaggaaaactgttttcaattttctgctgtatgaagttgccagtgttaaaccctttcgatagcaagtagaagaaatgttcattcaaacaggcttaattaactgaaagatataggtgtggtaaggggatcaggtaaagcttgacccaggggctaaactttaaggacctggttcccctcttttcatcccttggttttatttttctcagcattggcaccattttgtgacaagctcactccttgggtcttatgacaaatgttgactcttctaaaccacatctttccagattcaatatagtaggagaagaccagacttgctcttttcctggaatttagtctgacgtggctgggacaacatgcccactctcaaccaatttttgtagccatggagatttggaagtctggcaagtcttgggtcacatgatctaccttacagctgttactgcagacctcccaaagctcacgaactgagagtcaggaggcgtggttcccctaactcaaatcagaatttcgttatcaaaagaagagagggatggttctgtggtgtcccacactcaaataaacatcctttaaatacctctagatgcttataattcctgttgcagccttagtcagtgggagccactgacctgcattcgtgtaggaactgagcaaggttcatctagtctcggtagctacctaccccgagagctggctgatttttttttccttaaatttaattcaagacttcatgaagtcaacaaaatggtctgttggaaattattcctaacccccaaccactgtcactgccacaatcaaacatattttcattcttttgcagctgcagcccttctacttgaactttcccactcattgcccttataacttgccatttaatatctcttgctttcctacatggctgtgactactcgtgggcagggactgtatctcctgtttttggtagtgcctccagaaccaaacaccatatgtcataaggtctattaataaatatctgctagtttttaaagtttgagaaaaacccgtattgtggaatgaaaatgatactgacaaggaatacatctagatcagaaatactgatatcctaagtgagatcttgttttttaaaacaaaaaaaagtttaagaaattgtcatataggctgggcgtggtggctcacacacataatcttagcactttgggaagttgaggcaggagggccacttgaggccaggagtttgaaaccagactgggcaacacagtgagaccccacctctacaaaatattttaaaattagccaggcgtggtggtgcatgcttgtagtcccagctactcaggaggctgaggtgggaggataggaggctgaggtgggaggatcacttgagcccaggaggttgaggctgcagtgagctgtgattgcaccagcctgggtgacaaagtgagaccttgtctcaaagataaaagaaagaaagaaagccctatcaaaattttaaaaaataaaacataagaaaaaaataaatggatacatgatatttgtacttctaagaggcatcttctatacatttcctgtttctctcttccttttcctaaggagtccttgttgatttgtggccatgaaacctctctcctttccaggctggcttcttacctaggtcgtgtcctatccctttattttctggcagggctggactgtcacttggttgttctcggtttcaggacccacgtcttttgtctctgtaatgaatgtgttcagaggtctctgcacagagaagctggctgttaagaaaactttttcttctttccgagacaggctgcaaaatgcttgttactattttgtgtattcctggcaggatttgtattcttagttttattactaatgataataacagttaatgttgaaatcagctccatcctgaaagcactgcatccattatcttattctagtctcaggccctggaggaattttctctcactatacccatttcagaaattccagaattaatgctcggaggagtcaagttacttgtctaagctctatattacagaacttaaattggcttctctctttcctttgcggggtctcacatgatccgtcgttccaaatatgagcactttctcttgtcttttctgagctacctattccaagaacacagaggagttgttattgtggttacttgtggtaagaagagtacctttctgattggacccagggcagaaaaaagaactttcaggtggaaatacagtcgtggtgtcaggtagtgtgtaacttcgttaagttcagtcatagcagccgctgccaaggggggctgttcctgttcctcatttccaattgaaattaataactcacttgagatcctactaaacaacacacggaacaatgaccgcaataaccaacatactttgagtaactattacatgcatgggctctgtgctattctcttatgtgtattcatttatttaattcccttaacagttctttctggcagagacacccccccactcttagcccacttttatagatggctaagcagaggctcagagaagtcagacaactcacccaggatcaagcagagggcaagtggtagattctagaatttgcatccaggcagttgagtctagaattgtctttgtgtattttgctccatggtctagcacaggatcaccattggtagatcatcacttagaatgccatcactaccttctaacagcaatcagtccccttaagtggctttcttctcttttttttcttttatctttttgttttgttttttttttttttgagggagtcttgctctgtctgccagatggagcacaatggcgcgatctcagctcactacaacctccgcctcccgggatcaagcgattctcctgcctcatgctcccgaatagctgggattacaggcacacaccaccacacctggctaatttttgtatttttaggagagaggggttttaccatattggcccagctggtctcgaactcgtgacctcatgatccactcgccttggcctcccagagtgctgggattacaggcatgagccactgcacctgactaagtggctttattttcttatgtggggatcctggagacacagtgtgtgccaaagcgtctgcagaccagtctgtacagttgattatagatatattaatgaccacttctgagctaaaaaatgatctagaataatagactaccaaacacgtaagcttatttacggtttgcctccttctcatgcttttggaagggaagcactgagggtcattgtatcagtcagcgtagactaggtttgccgcagtaacaaacgaccccaccatgccatagcttgcaaaaacaaagactgagttcttgtctacactgtagggccgtcaagagctggctctgcttgctcttggtcttctccatgccaggatccagagtaaaagcacagcttctctctaggactccaggggaaagagaaaagacaagttcttaaagtttcttccaggacgtgacacctgacatttcactggccaaacacagtgacctggtcactctggggcagggatgtgtaatctccccatagctggagaagtaaataataatgcacaataacattgtctcccatgggtgcagatgtgatgctttcctccttgtgactgttttctgtcttgctgtcccaagtcctaaggtcccagccacctatggttctttggacctgtgattttcgctgaccccgaatgactggaggaactgctgcctgcatccccaacccagccctccttgtcagtcacgtagaaagcagttattgtttccaagttccctgcccttgttaaatgtcagctttgagtgaaaatgttcctaattttactcagagtgcaaagaacatccaggtcaggtacctgacctgcttgattcatgtcttggaaacactcctttgtctttcagagaaagtaaagagtgatggagacagagagagaaagtgtgacctactttttattatcagcaccatttcatctgcaaaacacgacttttctcttcttattacgctgagcatgaaaataaaatgttttccaaaagacctggctttggctgttgtgaggaaggccagggacttgttcaaaactctgatgagctcgatgagcaaatgattccaatttttaaaaactgtaattgactttcaaactgctctcactgtccacacataatatgtggtacttttctgcaaataccagcagcaaggtaggacaaaaccagctcccacactggctgtttgcttgatattaagctttgccagtccaatataggtcacatttccaaccagattttgtgcttatctctacattacaccttgtagcaagggggaaaaaaagagcttcttgacatctttttgaagaatggcgctctttaaaaaaacataagggaactttttttttcaaacactgtaatgagggtattcaagtctgcaggcaaaacagagctgtttgaaaagacattagcctcgaaaccgcactgtgccagaatagatacagctacgtcaaaatgccgcatttattttgccattacttttcactgactaaaaccatttgctaatgaaagttctagctgacataatttcagcacctgctgatggaaaggtggactcactggtcatggggagtacagtaaaattaggagagtagatagaatcctgaagcatttgagctgcaaaatcatagtaacaacagctcttaatatcctataattgaaaaagagattgccattttcaaagacctttcacagtcattctcttaatcaagtctcataataaagatgtcattgggactgagcagcttactcacattctcatttcactgatgaggaaactggagctcagggaggttacatggattctggatgacctacaggtcatggaggtaagagaggaatgggttcctggcaactccttctgagtactaactgttaaagtaagcagagtgtgtgtctaaacttctcatgggctactgtgaggagtaaggggtaactgcaagttagaaggcatgatgcccaagattgtccttactctgacacccactgcaagtttgaggtggtcctcaaacccatcctcatggctgatatttgctagaaggacttgtggcacttagcagaagctattgtatttacagttacagtttattacagggaaaggatacaggttaaaattagatcggggaagagacaaatggggcaaagtccaagacaagtaccagatgtgaagcttctattgtcctctacccatgacatcaggacagaatacttttctactatctatgtgtggcagtatgcatggaatattgtcagacagagaaactcacctgagcctctgtgttcagagtatttattgggtcttcgttgcgtaggtgtgattgggtgattgcccacatatttgatctcagcctccaagtcaactgataactgtggtacagtgtccctaccctaagcaatattgttggtcctttaagaatggttcatctgcaacctaaggttacatgggtgtagttaggccccatcctaaatcacattaagagtctccagagtatgatcagaggtgcccaagcaaacaaagactctttttttcaggaatatattctgcatatatttcagtgattttttttttttttttgagacagtctctcattctgtcgctcaggctggagtgcagtggcgtgaccttggctcactgcaatttctacctcccgggttcaagcgattctcgtgcctcagcctcctgagtcactgggattacaggcatgcacaacaacacccagctaatttttgtatttttagtagagacagggtttcaccatgttgcccaggctgctctcgagctcctgaccttaggtgatcccctcaccttggcctcccaaagtgctgggattacaggcgtgagccacgaccaccagcctcagtgaatgttttttaatttggaaaggattttataagaaaggattccaactttcccatttacagagaaggaagctgaggctcacaggtttcactcaaaccataaagctcaggagtaactaaaggaactggagcttgggggtcccagtcctgggcaccattgctaagtaatgtggcctattttcaataagggcttattaatcatactaaaaataagaacttaaaactaaatttttatttgcctagaaatctaacatctttagataaaaatattccatattcaggaggcataattctttctcttttcttttttttttttttgagacagagttttgctcttattgcccaggctggagtgcaatggcgcaatgttggtccacctcaacctctgcctcttgggttcaagtgattctcctgcctcagccttgcgagtagctgggattacagggatgtgccaccatgccaggctaattttgtatttttagtagagacggggtttctccatgttggtcaggctggtctcaaactcccaacctcaggtgatctgcgtaactcggcctcccaaagcactgggattacaggcttgagccactgtgcccggccatctttctttttcttcctctccttctaccttgcccaccatggcttaatttcaccagaatatcatcattatcaacatcattatttctagttcagatcattctaaaaatagagcagtcattttcttctatataagtcccaggtccagcctgctattttttgagcctacctttcctaatatctagtttatattttgttttgttctttcttgggattgggagtcagaatatcaactttttcagaaaagagctttggaaattctacatacataatatatataaattttccattcatagtgtgttagcagctttttctacaaatctcttggcgggtggggggatatttcactcttctatgaatcaaataatatatggctttttcctattggaaaaaattagtcgtgtgaactttattcttcaagaaaaagtagtttttatctgccttggaaatgtcaaaaggattcacaagtttcacaagtgatgatctgggttgattgctaggaactgtttttagttagtttttttttttttttttttttttcagacggagtcttgctctgttgcccaggctggagtgcagtggcgcgatctcggttcactgcaacctccgcctcctgggttcatgccattctcctgcctcagcctcccgagcagctgggagtacaggtgcccgccaccacgcctggctaattttttgttttattttgttttgttttttttagtagagacggggtttcaccgtgttagccaaggatggttttgatatcctgatttcgtgattccacccaccttggcctcccaaagtgctgggattacagacatgagccgctgtgcccggctgctaggaactattaatccatagacaaggctctggttagagaagcagaaagaaggctgggtagaccggggaaggtagctgggaggtctctgaagcttggtcttgaagctgtgaattcatagacgtcttggaaaagaactttataatgtggttagacaagttttataagattttaggattaggaaggcttttttagggggtggggttgcttttaaactttgtttgaaaaatggagcttgctgccatcatatcatcatcaaaaatggaacttgtctatccacaaatatttatttaaaagtcagactaatggcagaatggaaagaatcccagctttggagttaaaatatctcacttaaaacttgtcttcgctgcaggctacttggttgtacttgagtaatttactcaagattctcttcagcccagtttccttatctgtaaaatccttccactgttgttaggaggataagaaagccagtattggtaaaaacatatatcagagtccttttgactgtttagaaagtgttaatttactccacgattatccattcaacatttattagttggcttctgtgtgggagagtaaccattaataccttgaataagtttataatctggtcattctgtagagcttcctatatgatgtcttctgtttaagtatttctgtaataccttatagacatctcttttagactactagtgattgttggtgtcaacatatgtgtgaaaatgcatatatcctttattaggctctagcacacagtgtgctctcaatgtttgtcttttcaaataaacatacttggccaggcctggaggttcatgcttgtaattccagcactttggggggccaaggcgggaggatcagttgagctcaggcgttcaagaccagcctgggcaacatggcaaaaccctgtctctacaaaaaataaaaaagttagccaggcatggtggtgtgtgcctgtagtcccagttactggggaggctgagatgggatgattggttgagcctgggaggtcgaggctgcagtgagcaatgatattgccactgcactccagactgcatgagaacgtaaaaccctgacttaaaacaaaaacaaaaagaaaacgtgctcattggctaagcctggtagaagccacatgaccaaggctgatcattgctgccactgggtggcagcatactgggattgaggaaaataacccctcaactgcccggatgataaacacagagttctaaaatggcaacaaagggagatccacccttctcagttattgtttgaaaggacagctctcaggcaaaatatgtccacgaagttccatggaataattaccttccttggtgttaaaaaatgccctcacatttcaaacatgtcctgctttaagttcccagcgtcttaaccaggaactcgcttatgtgtgttgttttctgcttctttccactagggagctattgctgtaaaacagaaggggtagtattacagggaggagatgcacattttaaaatatatttctgcttcgtcaaactgtacagaactcttttcctcaatgagaaccaggtttttgcatgtatcttttgccaagatttgagaagggaagtctccaccttccagagctttggtcatattttgtttctctctaagggtgaagatgctgtttgttcttgcagggtgaggctttggccaataagaaagcagtgctcagaggtaaagagcctcgctgaagccctagttctagcctaccaggatttggtcatttcttggtttttcatttgatcccacccttgcctcccttcagaatgaaggtagaatgtgggactgtttcagaccatgaatgcgattgggcagaaagactgtgaaccaagagggcagggagaagggaagggatgtggggagagctaagtgtaaattgtagagtctatgaacaattctggagacagacaggacaggtaaggagaaactgctgctcttggtagaggtttacagccaattgtagaaccctaagaaaatacagcactttgggagtggatggacccaaaatgggtggatcatttgagcccaggagtttgagaccagcctgggtaacatggcaaaaccttacctctcaaaaatttacaagcttagccaggcatggtggtgcccacttgtggtttcagctacctgggaggctaaagtgggaggatatcctgagcccaggaggtggagattgcagtgagccatgctcgtgccattgcatttcagcgtgggtgacagtgagaccctatctcaaaaaaaaaaaaaaaaagttcctaagaaaataaagcctggcccatgcaatttgaatgtaactgtctataatttctcttggttactgaaattctgagtttgtgtctatggtttctccatccttgtctttgaggaggagcaggatggcgaagtcgcagccatttaaaaacttgttttcagtcattttgcagaaagcagacgtacacttctttgctgttggtctgtgatgcgggagtggtttgtcagttctttcattcaacaagtgctgatctttgggcagcatacactggtatgacctttatcatttgttcaggtgttgtggagaaagttgtttgcttttgaaagacttgatggagaaaagtctttctacatttctagaaagaccatgggtgtgagtattgagagctgagtgccagtttgtttttttgtttttgttttcgttttttgagaaggggtctcactctgtcacccaggctggagtacattggtgcgatgaaggcttactgcagcctctacttcctgggctcaagtgatcctcccacctcagcttcctaagtagctgggagcacaggcaccagcaatgacacctgcctaattttgtattttctgtagagatggggttttggcatgtttcccaggctggttttaaactcttgagctcaagccatccacccgccttggcctcccaaattgctggaattataggcatgagccaccatgccctgcccaggcaccattcttgactgcgagaaagtcactgtgatggtttctccagcctgagttttctcctgtataaaatggaccttgttttgaggagagaatgaggtatgtggtactcgtgagcaggattttcaatgcctggctggttgttacttatccatttagtccgagcttcagggaaagaacatgacaccggcctccagcagagcctgctcttggtccactgtttatcctggtgaccttaggcaagtcatttaatttccttgagttttggtgtaagtattgatggagcagaccatcaataactgttcttatgtctgttattaccatgtgtctgtctacatgtttgtttgtaaattctctgtgggtaaaagttctcttttcatccccttgcctcagcacggagcccagagccagactgcaggtaggcactcaatagatatttgataaatggatgttagtcatttgatttctgaagttgcgtaggtaccagcactacaaccctatgtagttcacataactatttgcagttgtattttcctttaaatctaaattggagagaaggaaggtaattaaggcataattatcagacttaatcaagcacttatttattgagcttacttggtgcctgggcttgtatcttttgtttctgatttttagtttcgtttcattgctccagcgtgggggaatttgcctgtgtatccttgaataaatgtctttctttggaaggcagattaagtagggatttctcttactgtttatttttgtttctaactgaagttcaatgaattattcttttacccagacacttacatattcctagccattccttttgcttaagtttgcagagatttgtgcttaaaactgaataaacaatctcagggtttttgtgtgtgtgtgtatgtgtgtgtgcgtgttatatgaagtcttgctagaatgcataaacaaacaaaaaaaatatcatactctcagatcctggatactgtggtcgcctggacttcaaaagccttttgtccgtatgtatttacataatgtattctccatgtttggttttcattaaacccatgagtttaataataaagtgtttggaactatgcttttccctaccacttttctttttttttttttttttgagacggagtctcgctctgtcgcccaggctggagtgcagtggcgcgatctcggctcactgcaagctccgcctcccgggttcacgccattctcctgcctcagcctcccgagtagctgggactacaggcgcccgctaccacgcccggctaattttttgtatttttagtagagacggggtttcaccgtgttagccaggatggtctcgatctcctgacctcgtgatctgcccgcctcggcctcccaaagtgctgggattacaggcgtgagccaccgcgcccggccccacttttcttgttgtgaatattttttccccttctgaagtgaatactgatttttcgttacagatatttgatgctttgggggcctgttaaaatagttgtaaatacactttctaaatagatgaaatgaaagaaattctgagaaggggtttctttgacttactggaaaaaaaaataataggaaagaaaatgtgatcagttggtatatttggctctctttcatcaacacttttatggacctgcattgctgtgtttctgtgatgtgtataaaacacagtttcagtgatcgtgcaagcctcagttttagaagataaaaagatatgaacttgaacccaagcttctctgtcaagagaattataatgtgttttgactgtaggcttccttcgagttaaatttacagtattttcccctaacaataacaacaaccagaagtgcccctttaagttgagatgcttgttaaactttacatgtatgcatgcatataaatgtacatttctgtatatataatatacgttcacatatagttacattagatttttaaagaatttcctttttgccttcaaatcattgcacagaacatccaagtagacatcatgtcaaaataatcaaaatgtatttaacgctctctcaagaaatccatttaagaataagaacacggtttgggggtgattttcagaccgtaaattgaagtgtaaatattcgaattattttcataaactcttcagttctgttgggcttttatgttatcatacagtgatttttttttttgtatttaagtttcctagcagttctcttttttaagagcctcaagtgtccaataaaaagcaaatacttgaattttcagtttctatatagtgcatattttttctcctgcttgccttatttttataacagtgatttataaagacattactaaagaataggaaagaaggattttgaagaggaactgctatataacactgcttaaaaatctatttccaatgctaaggagaggaaaaaaaaatactggcaccgtatccgagtgggatctgggatccgagtgagatggccataccttcagtcattctcctccccaaatatttattgagcctggtggacaaggagggcgggataagattgccaggccctgcttctatttctggggttgggatggcgactaaagacccgcgtggactgcatgctgcagccagctcaggaaagatttcaggaagagcgtttaggaaggcagctttgaaaagaaaatggaaagatgaggttgcagagggtcagtccaaggtgaccagaatctgacctggggcaatgccataaatccaagaaagactgggtttcaggtgcaggaaatgcgattgtgcacggacccttgcctttttacccagtatctagcccatccttctttcttagaagcagaattttctaagaggtacacggtagttcaggataaaaattccctgtgctaactgcccttgcagctagctctctgtgaccgtgtgaccatgtgacccagttctagcgaatggggtggcagggaagtcccacatggacttcttgggcgtgtccttaggggaagcatagcttcttgccttcttcacactcctccttcccttcctgccgtctgggatgtggggtctggcagagaaacaatattgtgaatggaaatgggaggaacttgggtcctgaaaattacaccataccccagagcctggggtggattatttcaggacctttcttccttccttccttccttccttccttccttccttccttccttcctttctctctttctttttttattttttttttcagacagggtctcctccacacccagactggagtgcagtggcacattcatggctcactgcagcctcaacctcctgggctcaggcgatcctcacaccttagcctcctgagtagctgggactacaggtgtgcaccaccacacccagctagctaatttttttttttttttttttttctgtagagacggggtttcaccatgttgcccaggctggtcttgaactcctagcctcaagtgatccgccagcctcagcctcccaaagtgctgggatcacaggcataggctgctgcaccaggcaaggacttttttttttttttttaaacaaacttcactcagtttgaaggcaccattatttgggtttcctgttaattgcagttaatcctattgagtaaatgtatcaaggacaaagagcagaatgaaaaaatgagtgagtaaagttgagcagaagaactcactgaaaagtcctggcaaggttccacggcacctgtgatgcttccatcacacatatttgctgagtacccgctgttcataggtcagtcgctatgcaaggcactgaggtgacaaagacaaggagaatgacagttaaatgtaacatgggctttgtggtcaattagttctgggttcgttcccaggtcctatcactaactagtacccttatgaacctggacatgtcactagcagcctcagtttcctcatccataagatggggatagcaatatctatctcctacacctgatgtgagtatcacatgagaaatgcacatgaaatgttttacttagtgatgagcatatggtaaataagaatttaatagattttagtgaaagcaaaataaaaggtcctatcattgtccttaaggagcttacgaaaacagagctatacgcacatccgtagacagttaccacactcaggaatagtggaaaactgacaagaccctggagatgctgtgtggggagggataatgggaacgcaggtcagcatgctctaggaatggtaagagaaactcccaatctgaacggtagtcaaagaaggtcttcttctctttggagactgaaaggctgagagggtacctgccctgctaaggaaatgaacaggacggaagaatgatggagggagaatgggaagtcctcagcacataaaagtttgagctggaaatgaaatatacaactctgcatagtcagcagattttgctgggctgggccagttcagctcagcaaggattgctgggcatgtgcttgaaggagaaaggtgaggatacaaaggcaatgagtacatgatccttgaccttgagaaacctatagtctaatagaggaggcacatataaaagtaattaggtaaaatatagtgcagaatatgcagtcatggagtcatctacagatctgcctggaatacagagggacaagtgtttagtattttccaactgttcacagaggacaagacacttgggcagaagtttgaaggcaattccaggttagcagtacccacttgatatggtttagctgtgtctccacccaagtctcatcttgaactttagctcccataatccccacgccacatgggagggatttgaatcgtgggaggtaattggatcatgggggtgggtctttcccatgctgttgttatgatagtgaataagtcccatgagatctgatggttttataaagggcagttcccctgcacaaactctcttgcctgctgccatttaagacatgtgtttgctccacattggccttctgccgtgattgtgagactttcccagccatgtggaactgtgagtccgttaaacctctttcctttataaattactcagtctcaggtatgtctttattagcagcatgagaacaaactaatacaccacttgaattgctggtacgtctgaggggcttgactcccagtccttcgaacatggaggggtagctctttttctaagctcctcataaagtattgtatccaattcttcagaagggatgaaggtatctggtcctgtccgcaaacagagaagtgcttcttgtactgaccaggcagtgacctaacgcagtccttgagacaattccaggtgcccctcaggccgtttttccaccctggtgtttttctttgtatagacagcctatgcctggataagaacatgctgcgtcagagagttctttttcactttgcccctcaaaatgtgcacaccgacagccacagatagatcccagatgtctttttcctgctcttgcaaaccttgaagtgggccctgccggcaggcacacctgccaaggaaaatgctgtcctcgaaatgttcctggcaccgttttcaagaggtgccgaccaagcgctggaattgctgacctccctgaaagagaagcctgcagctgcggcctctggggtgaattccccccatgggaggacctggtggagttaaaacagactatatccacatcacagagagctggcccattgctcagggcctgggaagtggtagggagggaccttcccagaagagagatgactcaggctggtcccaagcccctcctgtagaacaaacagacaaggtgaggagcaaggaggcatttggaggtcatctggcccagcacccttgtctggaagacagatttaagttccataaagtcacttaggaggagaacatagtccaggttgaaccttgctgcctgccctctggttgaaacatcagtgttgaatcaatagaccacgtcctgtccataccttgggaattagactcacccagactctgagttaagagtttctatgagacagagggctggactgggggagcaaggcttgcaaatcgaaagcatcagttgctacccctgagcaccatctcccataggagactctttgaacacttttttaaaaggcaagatgttggcctggcgtggtggctcacgcctgtaatcccagcactttggcaggccaaggcgggtggatcacctaaggtcaggagttcgagaccagcctgaccaacttggcaaaacccagtgtctactaaaaatacaaaaattagctgagcatggtgtcacatgcatgtagtcccagctactcaggaggctgaggcaggagaactgctcgaacccaggaggctgaggttatgttgagccaagattgtgccactgtactctggcctgggcaacagagggagactccgtctcaagaaacaaacaaacaaaaaaagtcaagatgttgacataacagttctgaagaccaaggtggtggaataggttaggttaggatacgtcggaggagccagtgtgaactgctcctttaagacatgaattagcccattttcatgctgctgataaagacatacccgagactgggcaatttacaaaagaaagaagtttattggacttacagttccatgtggctggggaggcctcacaattacgggggcagacaagagaggagagcttgtgtagggaaactcctgttttttaaaactatctgatctcgtgagacttattcactatcacgagaacagcatgggaaaatcctgcacccgtaattcaattacctcccaccagcttcctcccacgacatttgggaattgtgggagttacaagttgcaattcaacatgagatttgggtggggacacagctaaaccatatcaaaacataactatagctgggtgaagtggctcgcacctgtaatcccagtgctttgggaggccaaggtgggagaattacttgaggccaggagtttggggctagccgaggcaacacatagagacaccgtctctcaaaaaaatttaaagaaacttagccggggccgggcacggtggctcatgctggtaatcccagcactttcggaggcctaggtgggcagatcacaaggtcaggagatggagaccatcctggctaacgtggtgaaaccccgtctctactaaaaatagaaaaagaaattagcctgacatggtggcacatccctgtaatcccagctactcgggaggctgaggcaggagaatggcgtgaacccaggaggcggatcttgcagtgagccgagatcgcaccactgcactctagcctgggcgacagagcaagtctccgtctcaaaaaaaaaaaaaagaagaaacttagccaggtgtggtggtgcatacctgtagtcctagctacttggaaggctaaagcaggaggatcacttgagtccaggaggtcaaggctgcagtgaactgtgatcacgccactgcactgcagcctgggcaacagtgcgaaaccctgtatcaaaaaaaaaaaaaaaaaaaaaaagaaacacaacttaccaaaccaagaaacttacagagaacatgattagaagctagcatctgtttttaccctaccctcttcccctatgacccaccaccacgcaggccttgctaatgtggggtctttgtggaggatcttcaggatcttcagtgccagaacccagcatttaaactcttatttgacagtggggccacagcagatttaaaaggacaatgacatgataaaaaatgtgttcctgagagatttaaatgcaggcctatagagagcagatgttaaaagagaagaagcagactgggcatggtggctcgcatctataatcgcagcactttgggaggccaaggcgggtgcatcacttgagcccaggagtttgagaccagcctgagcaacatggtgaaaccccatctctacaaagaatacaaacattagacacttttcaaaagaagacatttatgcagccaacagacacatgaaaaaatgctcatcatcactggccctcagagacatgcaaatcaaaaccacaatgagataccatctcacaccagttagaatggtgatcattaaaaagtcaggaaaaaacaggtcctggagaggatgtagagaaataggaacacttttacactgttggtgggactgtaaaccagttcaaccattgtggaagacattgtggcgattcctcaaggatctagaactagaaataccatttgacccagccatcccattactgggtatatacccaaaggattatatatcatgctgctataaagacacatgcacatgtatgtttattgcggcactattcacaatagcaaagacttggaaccaactcagatgttcatcaatgatagactggattaagaaaatgtggcacatatacaccatggaatactacacagccataaaaaaaggatgagttcatgtctcttgtagggacatggatgaagctggaaaccatcattctcagcaaactatcacaaggacaaaaaaaccaaacactgcatgttctcactaataggtgggaattgaacaatgagaacacttggacacaggaaggggaacatcacacaccggggcctgtcgtgggctggggggaggggagaaggatagcattaggagatatatctaatgtaaatgacgagttaatgggtgcagcacaccgacatggcacatgtatacttatgtaacaaagctgcacattgtgcacatgtaccctagaacttaaagtataaaaaaaaaaattagctgggcgtgatggcacctgcctgtaccccagctacttgggaggctgaagtgggaggatcacttcagctcaggtggtagaggctgcagtgagctcacatcacaccactgcacttcggcctgggtgacagagtgagaccctgtctcaaaataaaataaaataaaataagcagcagcagcagcagctaggttccaaaaaaaaagttggaagggtgtgatgggattttagttgctggatgctgaagttctgccaacacagtgggtttggagagtaggagtgaaagagtggagactggccataagttgggagggtaagtaattggttgtgattgaaaggaaagaaggaggtaatgatgagttttggtctgggaaccggagaatggtggtccatggacagaaatagagaaggcaagatgagaagatgcaataggcaaaggcagtgagtttaatggttgacttttggtatttgctgtgtatgccctctgtacctttgacctgggccttcaacccttggacagagcttaagatggctgcgtcccaagtggtccatcccaagcgagttttccctggacttatctggaatgactctgaaccttttgaagaccccaaaactaacccaagctttgcatgatctccccaggatgggtaagacttcttactctctagagctcttttctctgtaggcttagctactcagtgaataaataggtacataagtgcttgctagcaagcagctgaggcaacctattaaaactcatgccagtggtaaagttaagctgctttctggtaagaatttcagaattccaggacgtctcaaatttctggctggtacaccctgggcaaggtccacaggctggatgggttttggaacatgtcttgattgtactttttcctcttggtttggaaagcaacgtaccctaggtaaggagagatttctgacaacagctcagcaatcacagtttccagaaaatggctccagtggatcaactatgagttaagtaaaaaaaaagtcagtgctaccgtttgaagtatgtctagagtatggttttaatccatcgctgtcaggctcacataaaattccaggcttctgtaactctttaacttgaagtattacagggtgtcacctgctaaatggaagccaagagaagcaaggagtttttcatggttaaatcttgtaaagatgctttttaaagcatattaatccattagtaatccatttggatttgggaatacggtcatatactgtttggtacaatatgtactaaacctggtcctggaaaattaagtggaaatataggtttaaactactggaacttcaaaatagcttctcagtaattccttctcagcaatcattccaattcctagatttaaaaaaatgttgatatatcaaatttccatcaagaggaacatacatatggatttttggagaggggagcagagcagaagagaaaactttcaacttttaatagtatttcaaatttacctgaaagtgacccaaataatacaagcaactgtttaccctgattctccaatacacctgcatctttaattatgctaatttgatacaggtgtcagattatgcattaacaaagacatcctttttctttgagtatgtgttttctatggttatgtaaattatggaggtgctaaacatacctttagagaactttgtatttgtattaacttttttttttttttttttttttttttaatagcgatggggtttcactgtgttgcccaggctggtctcaaactcctgagttcaagtgatctgccttgcttggcttcccaaagtgctgcgattacaggcatctgccaccgtgcccagctatagagctttatttatttatttatttatttatttatttatttatttatgagacaaggtctcactctgtctcccaggctggagtgtagtggcatgacctcggcttactgcaacctccgcctcctgggttgaagcgattctcctgcctcagcctcctgagtagctgggactacaggcacatgccaccatgcctggctaacttttgtttctttttaaatagaggtctgtttttactatgttggccaggctggtctggaactcctgaggtcaagcaatctacctgcttctctctcccaaagtgttgggattacaggtgtgtgccaccatgtgtggctatagaactttttaatgtgccaaggtctgtgttcagtgttttcttattcctcatctgacttagttctcaaagtccttgcctaaggtattgctgtcctcaccgtcctatggggagataggtcactttcccaagtctgggcagccagcagcagggctaagatcaccactcagaccctgtgattttatttttcatctcctcacatctggcgctgaatgtcaggaccttcctggcctctgggaaagacacaggatggctgttttgagaggagtgtgaaatacatgaaggcaggacttccacacacctggacgtgaactagaggtgaggtggggaaagacaggaagtagatcagtgttgcccagaccctaccttttccaactagggtgtggaccatccttcagagcttggcctccaagttggaacccgtgtataccactgacagtgtttcctgggatggtgatatttatcaagtgcagaggcccagacacagagagcttgaggacctttgtgtgagacagtgaaaccctcaaaggcaagggctctgtttcatgagttttctatctcctgctgctgtctcggtgggcctgtttgagttgacctgtcccgtcggtattagcaactggcaacagtgggtttttgttaaatacggcaaatattaagagtcgtctctgggcattttagtttattcattcatttgttcatttattccacagggatttattatgcatttactgtgtactaactaatggggagatagcaatgaaggcagactaagtgtctttgttctagtgcagccatatagtcagtgaatgaatgagtgagcaagatacaggagagaagtgaggtatggcccattataccagataaagtgatagagaggggctggcgaggagagcagtctaatttcaggaaagtcagaaaagtctttaaggaaactgaaggctgagctgccagggccagccacgtgggtactggagagtgggaggcccagtcagggggaatgctggcttagcacaactgaaaaatacaaaggtagaatatgaagtgtaatgacatggtttagattgaaatctgatgtggatggaaaggttttgtggcctttcagcccaaggtttgaaaaagaaatggaatttctaaatggagtgggtagccacaggagggctttagacaggacagtggccccgctggattttctgcccattgacttgggctcgaagtcacgtccatgttgctattacagatgcctcccagaacagtttatataatcatcaacgtatattcatggagcatcttctgtctgctagacacagaattgggtgttgggctttaaagatggatgaaaggcagtacctggtctagagaggctgctacctggatggtgtgtttgccatcctcagtaatgtgtgtcccttacagatgatgcccaatgactctacaattgctgggatactttttagaattttctttttgtgcattacttttgattcttggttctttctttggcattagctcaccagtggcaaatatgtatcctttaagggtggacttaattttttgagaaatggccaaaagtttgtttcaagtctagtctgatgaataaagcaggagatttatttttggcaaaagtggcaaataaagagggctgatttttgtatatggctactgaaatggcttagaatgccattttatcacatggtcaaattattcaatgatcaaatatcgaattattaaaaattatcaaaaggaagttccctgaaacatgaaagtgtttgggctttgtaggtacccaagtctactgggaaaaatccccatttctgggtaacccagccccttttaatgacaacttcagttctccaaattccacttccccttttagcctgcctcccttccgtcatccttcatcaaggtgacataggtctggcgatctttttggcatagacgtgtggacgttgtttttgacatttgtacatgcttttgctcaagttgaaggcccaagtttacccaattcgactgcccccacccagatagaatattcatggttagaccataaactacataactggaaattttaaatctatttttatatgcatacaaaaactgcaggcctgaagcttctaaaaataaacgttactttcatcccattatacaaaaatgcatttgaggtggtcatcattttatttgggccagggtcttccgagacttgggacaataatatattttttctactttaggcaaatgtatgcagattcttaaagcatgaatgctgtattacacacattataaattcgagtaacagaaatgtttgtgtgtagaaatagaatacggagtatatattttgtattaaataacctctgtggtatttgtttaccctgattttttgatttatgagtcgtcattgctcgctatagaagaagaaaaataaatatgcaaaacagtggtagatttttaatggggttacttcccatcttagctcagtgtttctctaccaaagctgaccttgaaattgctttttagatacaagtcaaaatatgcaaattccagaatcaggaggagtatccggtgttaggagttctttcgaagtcacatttttacatcatttccatcgacatcccgtgttccatctgcttcttaatccattagtacctgagtgggggtatataggttttctcaaatgctctaatctccacagaagttaaaatatccctaaacaggcatgtgcacatatgtctttctttcttttcttaggttaactttttttttttttttccttttgaatgaccacaaagcatatctacccagcggggttactttttttttccctttcagtattcatgacgtcaagtccctgtttgttatcttattgtcctcttatcctggtccttagagtctttcaagagaagaggttgatcccggtgtaatgtacagcttcattctaataagttgtatcgatcatgtattttcagtcactcttcatgtctatgctgtccatttgcttggatcccaaggaattttcttctgcccccccaccccatcccactcatatttcataagggtcttctggaacctgcatggtgttgggatgtatatatcacttttcccttgttatgaccagaaagactcacagccatgaatttcactgaagtttatgattggtccctgattgcctcacatcttgcaaagaatcctcttctagaaagcgttcttgcagttagattaacaagcagatatactgaactggtgcatgaatgaataggaaatatcccagttgcaaaggataaatctatcatgtagtggagagcgtgttcaggcaaaacatttggttctgcggtcgcttggaggattgggcccgtgctataattaatgccactagcagtaaaaggacattagggatgtcgcgcatgttgattatttcttcattttgtttatccaagtttccccgccttggaagctccgtggccattgccaaagaaagccctggagacagagcgttagccgttgctcctcgtaagcgcatcattaccttcctccgaacaaagtcctttttttttttttgtcagtagagggtgaaaacattattggattcaggagttcatagtagtcctgtatgaagctggggacggggggatagagttatgaaatggaccatttcaaatggcattatcttcccacagtgaggtacacctttcataaatcataggagagtgctcagaaaatagagcatttgttattcctgcagtacattgtatttgcatcccccctactcacaggaaagaagaaattctcaggtttcctttcccaggtttgaaaaggcagttaatcgccttacaatgaaattatatttttaaaaaaggtatcataatcaaataaaagaagtacttcatgtaagtcaaggattgtgcttttactactattttttctttttttgtaatcatggtggttctttttgcccacttatttaggccttaatttaattacggcgctgattaagttctttggttttattttttactgtaaacattgtgctgtattccgtaggaaaatgtagatgaatgtgggtcattgggaaataaagtgggtggaagtattggcgagcatttctttcccactctctacctcgcctggtctagccgctgataggtagttactctttagtatgcccaagttcaaattacgtatgactgtgattctaacacggaagcgccctccttttctagtagcttggatgtgattggtatggagaagcagagtgggtgcgtctttgtgtgttcttgacatagttaaagagtttggtatagtcaattccctttaaagtagtaggcttcttaaataattctagttgttcctcgtgctgccaagccatcttgaagaatttttcttcatttgtaaggggttaaaagtcatcaagctgattgaaaagtcaagaacctctagcgcagcctaccccttgcatatttgatactctcttttgcactctcgggagcagttttgaggacacactgtaaaaatgtatgacagcagtttgaagataagtctgttgccccaaataatcataagaagaagacagaagaaaaattgattcccgtagctctctgggcagtgggatgggggtaaagcaaggaattaataaaaacccaccagaatacattatttcagacaatcaaggagagcgttacattttaaaggtacttcatctcagaaagtttgagacatacttttcacacgtggcatgaagagaaaatggaatggaatgagcactaatgaggaccttgaacttaactaactgaacttgatggtcatcgcaagacataggggagaaatattttgagacatcattgtgcaggcaaacatgagcaagaaattgagaaatccgttcatgcacttctctctggtttcccggaagggatgaattccaaatcccgtggctcaggtcctaggtcaaagacagctctttagaaagagatgttctttgcttctttgctgactgcccatcccctcctctctctcaaggaaataagatattcatttgcaagtaaataatgcagcagtcttggatttgtatcagatcaactttgaatgaaagcctgcctttctgcgtttatttttgcttatctctcctgcttctgcttcctgttttgttaaataagggcaatgacggcaactattttaaattgctataaagttttagctagacagcgaatcaaggtggcaacacatggtgggttcttaaataatagttgtcatttgagtgctttctatatgatgtacatttcattttgcactttacaaataacctcttcctttttctgtttaatcttaaaaaagatcccgggaggcaggcgttattgtgcccatttcctggataaggagaatgaggtacgctaaacgagtaaaaagcaacccgagatccaaaccctttggcattcaagattacactcttattcactaactgttcatctcctccgactgcatcgccactcccccaggccagataacccatccagacctggagaactcctagagggagaaacagggaggacccaggcacataaacttgcagagcagctgagttatcagatcttccaagccatggggttatcgagctttatcagagcagccttgctcttgcagtttctgacacatcaccattgatcagtcctgggaaacaaacaaaatagagggcgatggctccactctgtgtggccccgtcaatggcctggacgcagctgaaaaaatccagaagagtgtaggacactggaaaagtagcagggtgtgcgattgcagggatgggaccagcagtaaaaggtagccctgccaagaccattaagcttcctgcaactccttctggatcccacaatttgaaggggaaatctttcccaccgcacatcactgtttggtggactaaatggctccccgatgtcccgaaagagcacagcttctggaagtgtggtatgtggtccctgagatgaagcagcagccacaggaacccatcattcctgctacccaaggcctccattgcctggttttctgttgtcagaagagttcattttcaggtccttcaccagatattttagaagctcatcaaggaaaggacgtttgaagaaaaacaaataaacaaaaacacaaaatcaaggacgtattgatttctgagaattcctcctgggttttgtttgtttgtttgtttgggggttttttgctgtggtattgtctgagcctatgataagattgttgttgattgatttttgtctttcaagactcagcacaacacatcccatccttctggataatctcttctaccctccctttccagataaaagttgactctcataattgtaactctcccctactttatcagcatctacatctttcagcctctaccacattgaattggaattatatgtctgttttatgtaccatgctgtgaactccttgaagataggagctgtcttatcttcaaggtgctcaagacacgtttgttgcatcagttgaatggagtcaaattataaacaggtgatgggggcaaatatcacaatatgatactctgaacatcttctctgacaaaaactggtcctcaagatacaacaacatttatatttgatttgtcttgctgtatcgaatcaagctgtggtcttgagtttcgtacacatctatgtaagcactctgaattgagtgactctttcccaaagatcatactgggatctttggaatgaatggcgggtcacccatccaattgcttttgcggagattcgagcatgtggggaatgcaagtcacaatatcctgcaaaagccaacttgagacctcctaggactgcactgctgcttatgacactgatccttagcccatctaagtaagtgagcatggccctgtaagtgaaattggagaggttccttgacattcccacatagctgcttccctggtaattcacctgggtccagaacacagaagggagattctaattgaaaaacttttcctaaaggccaggcacagtggctcacacctgtaatcccagcactttcagaggccgaggcagggagatcacttgagatcaggagttcaagaccagcctgagcaacatggtgaaaccccatctctacaaaaaatatagaacattagctgggcatggtggcgtacacctgtagtcgcaggtacttgggaggctgaggtaaggggattgctggagcctgggatatcaaggctacagtgagccgagaccgcacctctggagtccaccctgggtgacagagtgacaccctgtgtcaaaaaaagaaaaagaaaaagaaagaaaaagctttgcctgtatatgtagaacaaatgaaaaccaaataacagtggcaccagttcttctttcagtttccatggaatatcaagcacgatttgagttgagcaatttgatttgattgatcttcttaaatgtataatctcaaactttacaataagaaggctacttgtctttataattgtgaaatccacccttagttttaatgcatctaaagtctctgtatcaaaaagatcaaaatcaggtttgaaagtctgtactgtaactaaaaaagttttggggtttgttttgttttgaccaatttttgtaaatctcttctgttactgtttatatacccggccacttctgccaaaatatgctggccttttagtcttttggttttttctctcttttggtttgttggcttatgttcgctgcttgatctgactactggttttatttctaaggatttttttttaagttggcatctttttttctttgactttccttgtatgcccccctttctcccctgcattgtcttgcttcattcatttctttccaggttcctgcaaattgtttttatttagggctcatctggtatgtgtattatgttcttggtagacagaagctgtctttagttcgtatgggttgagcatggagggaacttcatctcgtagtcactggataaggagccagtcctggctcttcctttaactgcccttgtgaccttgaacatgtcagttcatctcaccacgtagtcattttctcatccgtctcttcaggctaataatcacctgtcctgccttcctcacaggcttgccgggcaacccaaaagagccgctgatctgcatagcacttcgcaatgaagctgtgctctagaaacataccacgatctactggactttcttaaataaggtggttgttcaggaaattcctccagttaattttactttaattccccctacaagaatgccgagacacctctgcctattttctctttctgtgtttgttgtttcttttgtttttgttttcgagactgagtcttgctctgtcgcccaggatggagtacagcagtgcaatctcggctcactgcagcctccaactcccggctccagtgattctcctgtctcagtctcccaagtagctgggattacagggatgcgccaccatgcccagctaattttttgtatttttagtagagacggggtttcaccatgttggccaggctggtcttgaactcctgacctgagttgatctgctcacgtcggcctcccagagtgctaggattaaaggtgtgagccaccgtgcctggcctctttctgtttcaaagaaatagtcaagaagtttctagatgcacacaaaatgaccaaaccagtctttccgcttatttacacaatgaagaaacatcagagttcaccctggaagacagagtttctttctgtcttcatcctagggcacaggagagatgcagtgatggcatgtctccactctgcagacatgttgcaggcctggaaaactgtgtggtgcgtctgtttttcagagcgttgagagtcatgcgggccatatggatgcagtggtccacagaattggcagtgagcccccgggggagctcagtgcaagacaagattctggcgtaagaactgcggtagcaaggacaagagggcgtcacggtgtaagaatggccgtggcaaggacaagaggacatcacacgatgaccttctcagagtcagtaggatagtttcccttcctggaagattgagatgaaataaagctttaggagttggtatcgcacgcaggcattaaatggattgtgaagagggactttgttccccctcagtcttgtctctgcctccgtaaaggagtaagttaaaaaagaaagtttctttttttaaaaaaaagccttactgctcaataaatccctgtggaaaaaaaaaaaagagggggaaaaaggaatgcacattagtcttccattaaaaatagatcaaaaaagtacccaaaagagaaaaccccataacaatgaaataaattaggataatccaactggaggcctgcaaatgagtttgctaaatgttatattttctcaagccacttagatttttaactccctgtttctgcctgaagcaataaaggcaggaacgctgtcattagcttcaaacaccattttttaagcccctagctgcatttgttatttttctcttcccccccttagctgtatccctgcatttattacagcgcaggtgcatcttgcttttgagtgctaactgagatgaaaggagtgaggaaacgctctcttcttcttgcaggggagggctggcaaattcagtgaatgcagagtcggctgggagcctttcggctggaaagctcttcctctgatgagctgtctgttacagattttcagggatggcccttgataaggcaggggtgtctgtccacgccacactgtggtcagataacccccgatcgtaataagccggaggataatcgcttgcattgttcaataaagcaattgctttgtcccctcacttagccccttcagaaaagccaaaaagaatgtgccacctagatgctatttataaccattttcacctcttgcctccaggggctaaattggaaacctaattttagatgcataaaagccaaaatatgtataggagaagctccaaaataaaatatcccagagtggcttgtaagcatccttccaacaggttcaggttgatttaccttgctgtggatatttaattatgtcattgaaaaaaacaccagtaattaaatcattatttcttagatgtgaggtccaaggacattctagaggaagtcaaaggcagagggaggaagggtgggacgatggaggcctgaagggctggtggagaggaaagaaggcagcctgtgccgtcagagagagttcaactccatccgtgcagctgctagcatcttgccttactcagcctctgtgaaccttaagttgctcagaatgagacaggtaacacctgcctccgtggtttgtcaggacatttagaaatgcagacttgctcaagacctggatctcaggtggtaggttggtccacagacagtggcaccactagctattatttatttgttgtcactgtttgggacccctgttgctgtctcaccaaagaacttcttgtctcccttttagaagtttccagagcgtcttcctgatgttgcatagagcactcacacctaacagatctcagaacttgtatcttttctgggtggctagactgaaaaatccattttcttgtgagtgagccagaggtctgtctcttgcggcatttctgcttttgagaacctcccgtttcctgaaaggcaccagaccccaagacagctctgctgcctgattggtaggtgcccatgacagctctgcttcatgcctgctgcctcctcatccctctggatgccttgtggtcctgcttgtctgaagagcataaacttgggggttcccactcgaaaagaggttccagcagttccagcccctatgtcaggggagccacttttggggctggtggtaggcagaactttggccctcgacatctcctctgttggcattactcctatggtggtgttacgtaacatgacaaaagggaccttgcagatgtaattaaggtaactaatcagctgactttagaataggaaggttatcctgggtgattagcatggatcagagttctcacaggagcccttcaaagcagaaggggaaggtggacaagagaatcggagagatgtggcagagggtaggcagagagattgcaagcagggaaggatttcacgtactgccactggctttgaagatggagggggcacatggctagaaatatgggcggccctcagaagctaagaactagctctttctgacagccagaaggaaatagggaccttccacctacaatagcatggaaaacggggacctcagttctgcaactgcatggagctgaattctgccaataacctgaataggtttggcagcagattctttcctggagcctccaaagaagagcccaggctggctgacaccttgtgagtggccttgtgagacctgaaacaggaaacccacctgagccactctttgcctgggacttccaacccacagcaactgtgccgtcgtgactagatacgtttttttaaggggatgataatttgctgtggcagcaatagaaaatctgatacactgtcatggggccttccacagggtggggctcaaccagccctcagctcatctagcatgtttcctcctacaacctggactttttcctgttgtcccctcccgtgacactcagctccctgcattcaatagaattgcttttgtgggatgatgagtgtgttcagagtcatactcagcctaattattgcttttgaccaaccccaacacataatgctgtatgtcatgctgtactacttttaatttcacagatgaacacatttctgttcttttaatccacctctccaaggctcgtgttaactccatctggacaaagccttgaggtatacgtgtggcttcttttgagcatcgtgccatagctgtccctgatctaccttgcggggcaaacacaacaagtaaaaggttttcctcttgaaggattgaacgcctcaatgcgtgcatcctacattgtctagtgggagaaatctccgttgtagattctgacatgtcactccacatctttgtaactttttatggctctcagccctactttcttaatagtagcagcagtatttatctactgtttattgtattccaggtaaaggatatgtgaagcacttttcatgcattatttaacctagctataatactcccatttgacagatgagaggactgaggcttgtagactttccaaggctgtgcagctctaggtctagtctgccatttgaatttgggcgatgataccagagaccaagttctcaactatgatatactgcacatgtttttgtttttgtattttggttcaaaaagagagtatgatctcacttttcccttcttgataggttgtagattccatgtctaatccatccttttccaatattccctcctaatctttcagttgaattacggtctttagctcaaatgcatgacatgatgtgtgtgcctttggagtggggcggtattagtcagtcgatggttatttccttgaggagaaaggaaaggagaagttgagtacttttcagtgtttgttactacaaaagcatggtggcatgccattgttctgagaggaaggggcttttttgccttgtcagctcctgatgaaaaagatgttgggttggaaagctaagttacagcaggtgaacttgaatttgaggaaagacaaagcaaaccctggctattaaaggaacacacacacacacatacacacacacacacacacacacacacacacacgtttctggtattaggaaatggagatttctaacataataaaaaagattgaacttaaaaatgacttccattaaatagggtaagaattttgaggtggaatcctttttccttgggtcagtactttctgcaagcttctaagtaatggtttctcttagacactcacggtgataaaattgggagttttcaaatgaaatctggaatgatctactggcatcatgcctaggactttggaaaacttgaaggttggcacctttggggaaaaccagacttttgaagcaggggctctgattgtctcttcttattatagtgcaaggtgtttggcagaggtgtggtagctgaaggcccaaggataacattgtccagattttcagtctttggagccataaacatccggttctttccagccccgctcaaccgcctctcttaattcaccaccctgttagcttcatctcaggccagacattgtaggtggcagcaattgtaggacaatgagaagaggccagatgaggacagaatttttattttccattgccagtaacaaacacagccctaacttgcttagaccaaagatggggattgattggcaactgggaagcctaagggtggatctggcgtggctggatctaagtgattaaatggcgcggtcataattctatttctctgcatctctcagctgtacttccatctctgtaaacttcatttgcagacatggccagcatgcgcccatagccttaatgctcagggaatattggtgggagagaaagctcctttcctatagcttcaagcaagagtcccacggctgactctcattggccctcagtgggtcacatgtaaatcattgagccaatcaccgtctttctgtctggacctggaataaagaccaccttagagcatgggagcgggatccccttgatccacaccatatagactgtgaggtatgaagtacctcacagtaaagaagtcatgttattgctggaaaaggggacatgggtattaaaaagacaaaaacaacagggcttcatcacagcagctatactgctccatcaatacccatcccaggagacagtggcagtcttgatgtcaatcttgttttaggatcattgccagtggaattcaggactgcggttctacccagtaccggggaaccaggtgagggggttaagaggcctgggcccatggaaggggtgagagagagccacatacttacagttgtgaagggggccagccaggatggtggcttgcaggaaaggtctgagcagagtaagaggcagttcctggcaccagcatgccaaaggcagatagcaacactcttcaatggatgtgggtgagaggacagtggaatccagcaggggccattgtttccttccataatatttttaaactgtagcaaagtgatctttttgagacccaaatgtgagtatgccattctaatcttcccaccctcagataaaccacagcaatgattttatactgtctgtagggtaaagacagacccctaatcataacctacaatccctcgacccagtgacctagcccccgtgtaccttccctgtctcatttctcactgttatcattgtaaccctctaccctctcttttggcttcctgcagttgccctcctgcagcagggcttttgcacatgctggtttctcccttactttgcctctactcagtctttatatttcaactcagtggtcactgtctctaggaagccttccatgactgcattaaatccttctataagttttcatagttctgtgcatttcctcttggcagcaatgcactgagctgcagttttacatttttgtttttttgttttttgagtttttttttttttttgagacaaaagtctcgctctgtcccccacgctggagtacagtggcacgatcttagctcactgcaacctccacctcccaggttcaggcgattctcctgcctctgcctcctgagtagctgggattacaggcatgtaccagcacacctggctaatttttgtatttttagtagagacggggtttctgccatgttggccagcctggtcttgaactcttggcctcaagtgatctgtccacctctgcttcccaaagtgctgggtttacaggtatgagccaccacacctggcctgtttttgtgtttgtttattaattcctatttttcccacctgacagtacgctccgtagggcatgtgtttgtttcggttccccaacgtatccctactgcccagcagaaggcttagctgttaacaagtgtttattgaatgagtaagtgaatgagtacgtgaataaatctgcgctttagaggcacttgctcaggcttgtggaataattctacagagagaaacaggaatcaaagggaaacctgaagctggctcagaagatggatgggccagcaaaggcttcagcaaaaccacacaatgctcatgaaaaatcacgcatttctctgatttgtggttattgcttccctggattttttttttttccagttgttgttgttcatggtggtggtggacaatctgaccatataccaaccaaattgactgttaaattcaatcatcagtgaccactcctgataatctgacctcctaagttagagcccctgggaagttcagccgtggttctgaccaggcaggataactatctaagtgttcccctttggacctagactgagccaaagattctccttggtctatataggataatagatttctaaaacaaaccaatagctcaggcacaattatagtggggggtggggggcatgtttaacctactttagagaacaaactctttttaagggctttgcacactaattgtatgcaaatggatgctgctaattgcaaacacaaaattcaaacctagtcaaatttgaaacctgttcatcaacagtccctttaggacctctgccccactctatgtatgcagtttaaattgctgatttatggctacataatgtcttcctaacccccagtttactgttggcttccttcagagtcattgccccaggggactcattgacggcagagagtgtgtcccctccactgttgcctcaatgcccagctcagcccagtgggtaccgtacttcaaaacctcttattgaggtccacctctgtgccaagcatttcggtaggcagtgacagaagagagtgcatgcatgaatggataaactctttcctggaatgcctgctctcatcacctggtttcaaagtcgagccagacgttctgtctcagctcagattctacctaccctgaggttcgcagctgggcatgatcgagccactctccactctcctgtagcatttttgggctttgagtttatttgacacttttcacttgctgccttatattgcgtttatttttattaattacttcagtagtcatttacaaaatgctgctgaatccaagtccctgtgcaagatgctgcaggagacaaaaagatgaacaacacgtggtctttgctttcataggttatttctcctcttccatagcaacacatgtcaaggcaaggaccatatcttattcagttcctagtcatcttttctttcttttgctttttcttttttaaattgttaagatctgccataaaaatgtctgtcagagtaggcatgattgcatattctttagatggatgggtggatggatggatggatggttggatggttgggtggatgtatggttggatgattggatggatgatggttgagtgagtgggtggatggataggtggaaggatgaatggatgcatggctgagtggatagaaggtggatggatggagggatggatggttggatggttggataattggatggatgcatggatgtttgggtggatgaacagatgaatggatgcatggatgaatgagtagttggatggatggataaatgatgcatggatagatgaatggtgaaacttttatattttactaaaaatctgcattgatagcctagtggcttgctaaaaataagggagctgcccaaatgccccatttcctttatatacttgtggagcagcagcgaaggccaagccagtgccaggggctggaaacagacacataaataagaacaaataagatacagacctgacctcaatgattttttgatatagaagcataggcacataaataaattcctgtaatgggagtctagggtgaggggtggtgggtgccataataaaaattatataaagtgctatggggaagcaaagctacatgaccaatttgttctatttatttatttgttattattatgttttttgagacagagtctcgttctgtcactcaggctggagtgcggtggcatgattgtagctcactccagtcttgagctcctggactcaagagatcctcctgcctcagtttcctgagtagctgagaccacaggcacgggacaccatgccagtctaatttttaaattttttgtagggacagggcctcactgtgttgcccaggcttatctcaaactcctggcttcaagtgatccttctgcattgtcccccacaaagtattgggaatgtattctttcctgatcaggaaactccgcagagagaaagtgacagttgaagactatattgaattttggcccacaggaaaaggaaactttgctgttagggtcacctggaggagagactgcaggggtcagagatcagggccatatgctagagctgcaatgtgggtgctcaaatgatgttcagtgcatcttcacagatggacctccacatgtccctcatgccctaaaatagatattctccacagctgcacatacaacaacgtcagtgaaatccgttgagaggagcattgaggagatgagtcaggtgtgccgcagcactcaggtcagacttgaggcaagtgagaggtgtgagttattcagagtcccagagagcttgggccaaaagagattctatttttactggagcatgtgagggtggatcacaactaggatggcgcgaagttcacctcgtgtaagcacaccaggctgcagggataataactgcactttttaaaaccagcaaatcattcatatttactttatgaaacctcttttaactttattttttatattttttttattttcttgtttctttttatttttaaaatttatttttgttttttttgttttgagacagggtcttgctctattgcccaggctggatggagtgcagtggcccaatcatggcagcctcagcctcctaaactcaagcagttctcctgcctcagcctcccgagtagctgggactacggttgtacatcaccacctctggctaatttattttttgtaaagatgaggtctcactatgtttcccaggctggtctctaattcctggcctcaagcgatctcccatcccccctcagcctcccaaagtgctgagattacatgcatgagccaccatgcctggcctctggccttcttttcactttagaaaaaaacaaaaaacaaaaaacaaaaaaaaacacaaaaaaaacttttttttttagaactgttttagttggggagccaaaattgagcagaaagtacagagagttcccgtatacctccggcagagccctggctcactatctacatccccactagatccatgtatttgtttaggttttgggggtttgttgttgttttgagatggagtcttgctctgtcacccaggctggagtgcagtggcaccacctcagctcactgtagccttgacctcgagggctcaagcaattctgctgcctcagcctcctgagtagctgggattataggcacatgccaccatacccagctcatttttttttaatatatatttttagtgaaggcggagtttcaccatgttggccaggctggtctctaactcctgacctcaagtgatccgcccatctcggcctccccaagtgctgggattacaggcatgagccaccactctaggcctgtatttgttttaattgattaatctacaatgacacatcatcatcacctaaagtctataggttcattaggttcacagttggtgatatatattctgtgggttttcacagacatggaatgacatgtatctatcatacatcatatattgtatcatatcatatcatgtcatatcatatcatatcataccgaataatttcattgccctaaaatacctctgttttcactttttaatctctttgtgcacacatcaaaaattccttttgtgtttttgagtttcaaaagtgtgccacaaacaagaaatttgggatctgctgagcccagcctcagacctgtaggggaaacaaagagggcaacaggaggtcacgaaggcatgctgtgcccacttttggaaattgtgaaggagagtgtctcaaacatgtaggcttgagccactcaaaattctgggaaataggatgttttgtaaagaaagtttgctactgtcacttctgagtagttgcagtccctcccagtacgtgggtatcttcggtgagaacaaatttcctggcagcttgaggactccgtgtgttattcacatgctttatttaatagacttgcctcatgtgactttctatatcatcctttgtgtctaagtgatttgcactgggaagatagtaaacgctcccactttatatgcagaaggttgaaaacaccatgagtgttgcaatctgaggtatctgcccttaaagaagcaatatttactgaaatgcagggcacacgacttttccagcaaaccacaccgccgtccttttgtgtgacgaaataattattttgagataccgacatgcgtgacgaccagataattatctgagaaaacttagcatctaatgatgctgttttgagatcacaagaaagaattatattagcttgagctgaattgttcttttccccctgtctctctttagttgtaaaaacacccacaaatgtgaatgcttcaggcctgaacttgtcaacagccagtggctcattgtagacatagggatgtcgcctgtgtttggggctgagacaccagaacaggtgttctgtgggaactgagaatgtctactgctgcacacctttaatctcgggtcttctttctggtgaaatacccgtgattcataactcagtcacgttactgaggtatgtctcttcggatagattctatctctaaaaactacagattctatctctaaaaacttaagtcaagggattttcaagcagttgtttgatttatgtatgtgaacctctccgttaggagaagaacttttctttggcaaacaccataggaacggagaccttaacaaaagaattaggactctcttgtcctgttttaatctcaaagctgtccctgcgctggtgcggctggcccacttgtgcctttgtgaatttgcagagaagaggctgggcgtggggggacacatgactaatccgccctttcttttgtttgtgcaacaactcaattcactgtcaccacatcagcacatttgctgcaaatctcagtgccctctcactttcgttttatttaatgcgtttctacattttcccaaggccacatgagctgttttctggcgcgtggtatgcctgcctcaaataactaacattgcctgggtcttggaatctgagccttcatattctccgatatattatttggtcctattgttccttaacttgctcatcattcacacggcgaaggaaattccatttggtccttttaagaccgccagactagctgacttaaacactcagctccagctacttctgaatatttcggttctttattgaaatggtccttttaatgtcatctttaatttaatcaaatagtgtcatcaaaataacatttactctattactgaaaattcactgcattattaactagtgtaactagacaaaaaagatggtacaaacccccatggaaatatatacttactgtaaaaatggatagagttcatggatgttctatatttaatttgcactttcaaagtactctctatggagaggttttatggttctgaaataatttaaaaacacactttactacaatccatagcaggtagttttgccaatttgggaagttatggtgccttgcagtttccaaagtaagctgaacagtgttttttaacagtgctgcccctctctcccactagaaatgcgagtccatccttttaccaagtgtggtacaacaaaggtttctctggttttcttttggtattctcagacaactgaaatataaattacatggtatgtgcaggtatcaccaggatgcaattagtttgatgaaatataccaagtcgtcaatgccactttggatagtttaatctgaaaataggacatggttggggtagtgggcacaggggaaggaaggttatgtaattttaaaattcttcctttgattcaaaagaaaaaaacatgtttgttgcattcaactccatagggtgagcatagcttagtggggagagatttggactaaaaaataagagttctgggttcaagatctgaggtaaattatttgctaggccttagtttcccatctgtgaaaaaagggagttctataacagcaagacatttaatattaaaataatgtaatgtttttaaaaatgcttgtctacccactttttcttgagattagtaagaccatcttccaattagaatgtttatccgaacttaccgctaggtatttccttgtagagtatgaaagtaaaatatcaatgggccatctctacgtcaaggttctcgttcttctcattactgagaaattatgttcctggaataatattgtacagacttagaaataagggcattgaacttaattcatttatttttcaaaaggcatgtattttttacctgttgctatatctgctgccagccaagtgctgtgcttggccctgagaaagcaaagagagatagagatgtccatgttttggaacttgacgtccattaggggacataaacatttgaaaagataacactaacaagctaattcaggtatgataataaaaaccttcacagggttagccatccatctatctgtccatccatctattcactcatgcattcatccacctgttcatccattcatctgtccattcatccatctatccatccatctacttctaggttgtgagaacccgtagtattgactctcagtgtgataggaaggccagtgtcttggtgaaagatcaaagagctcatcaaaatttgtcggatagactgcaggctcagacactgatgagacccccctgcaactaccacatcaaaaggcctaggagcctttccatgaccaaatgcccatattgatgaatccgagacaagtgagggaaagatgtcctctgtcggtgttctgaaccctgtggaaatcatacggggaactataaaagatcctgatgcctggttttcttctggagagtctgatttaattggataaggatacagcctgggcatcaagagtttctagatgacctaagtaattctcatttgcaaccaaggttgagaataaagggtgtgtataaggtgagagacttctggttaactaaaggaaataccaatgacatttgtgctttaggtctaccagttagtgggtattggtgcatggtgggacagactaaatggctacaggtcagggtcattgtcaaagagtgagggataaggggttgtgctgtggctcagaggcagagtagactgaggaagaacagctaattccagaaagccatgttgtggtgtaaaagatagtacctgacttgtaatgtctgacaccaaaaatgaccttaatttgggtcataggacaaagacctccccacctccagctatgaaagacagaaaatgataggactaggcttcatattttctagcgtaacgtttggcttgtggtatattcaaaactaagtccgtgtttgttgctgctgagtgactgggctgatactacctgtccttcagccatctagacttgctctctaccatcctcaatacttcatatgaaaggagactgtcacttcatgaaaatcatttatttgctttagcttaaatctactggagattacaactgcctcattttgtcaccttcttaccccagaaggaaatatctccacaagagagcaggtatttattgagttatgactgtcaggcatggaacagatccattggtcagaaataaggaaattgtctctaccttcaaggttctcacagtctggagggaacagagagccatcagggacaataggtccctgtgccatcagctactgggatgtatgactttccagtagaggtacacagcacttgttccaaaaggagcctatgtagctttgggagttctctatttagtcaccttattttttttgtcttcttgttaaactagcatcctgttttactgaatctctgcctcagttgctttatttactgtatacatacatagctcttttgaagacttgatgtcaaaagtaaagaagttcagaacctacggggcttgctttgggtcccaaattatcttagctttctggaaagagaagaatctataatgtattctccatggagtatctttactcacttgtgatgagatgtctgtaaaagtaatcagctccatacatctgggcatgatgaccctcaggcccttgagactcaggtgttctcagctcatggtgcaagttcccctgaaagaaagactcaagccaagcattcaatggttatgttccagatcatagtctcctaaaagccaggggtcctttatgcagggatggtgacatcagaagttaaaaggtctatgcagattaacgaggaaaaatgagggaaattactgtaaggtttttaaaacatgatagttatatatgaactgatgattatataattgaacatgcctaaattgatgtagttctctgtaaaactagttggtgtaaggaaacttggtctttgaccatcaaggaggttgcagtttgtggcatggcacaaagataacactcagcagatatatagctatgggatacatggatggatggatggatgggtggatggatggatggatggatggataggtagatggatggatgcgtgggtgtgtggaatggtgggtggtaggtgggtacatagatggatgtatggatgggtgggttggtgggtgcatggatgggtgagtaaggggggataaatgaaaggcttgttcttctgaagggactctttacaaagagtctttgatcttccagcttcacgtgcaagagaatccccaaggtgagcttgttaaaataagcatattctgggtatcacttcctgattttctggttcagtaagtctgaggaggaacttggggaactttatcttttaaacaagtacctcaggttatcatagtagtcttgctgtcctgaatcttaatgcatctctatttctgctacatcttccatgaagttgattttgcagaaatcattctgtggttccacattgactgcatccaagacctattgccttcagatttacatcaagcacaatttggcaggtattagggatggacccagcagccaagtctttgttgccttaaacagatcccttgtctcttgtcaggacctccttccaggctgctcctgagcaagtctggatgtgacttctacctatgatccagtgggttgggccataaaggagctttggaaagggacagtcttagggtgaaaaagagggagaggcttgccatctgaacaggaatctctcccagaggagagaagagaagcctaggctttaatgaggacagccaccctgtggatgactttctgtgtgatgttatgtggaggtggcttcttttttctctatcccattagctgaattctgtgccagaaggaagagatttggagtcagcaaggcatccttttttttttttttttttttttttaaaaaaaaaaaaaaagaaggaatgtgattgtgaaggaagcaagaaaaggcccaaaggctctggacaagggctaggaggctgaggagttttacacattcataatttccttgtaggccaagcttactctcagggatgacagtcattttctaagaaagtgagattgcttcacattgcatttaaaggcttaaataatgtattctgtcagacaattctctgaaatggttttccaagtgaatgcatcagaaagtgcccagaaagaatgcctggcacaggaagaggagggcattcagaaaatgtgagctgcttgcatcagaatctaacttgagatgtatcattcctacggtaaggtgcacacacattaaatgtacagttcaatgaactcatacttatttatacaactgtgtaaacaccactcagatcaagacagagaacatttctaacacctcagaaggctcatctgttcccctttctaagcaagaagtaccatcagcattaagaggtaaccactattctgatttctatcagcatagttttctgttcctgaattcatataaatagtcacccagtacgcattctttgctgtcttgcttcttttactcctcattaggttgtgggatttgcccacgatatttcattctttattgtcattcttctttctctgccactgccatcctaccaacagtttgtattatgaaaaattgcagacgtacacaaaagttgaaagaattgtactgtaagtactctgatatgcaccacctagattctacaattaacatttccctctatttgcatctctatccatttaccattcctcttgtctatccatcagtctatcttgattcatttcaaaataagttgtaggtcaggtgcagtggctcacacctgtaataccagcattttgagaggcagaggtgagaggattccttgagtccgggagttgaagaccagtctgggcaacatagtgaggccttatctcttcaaaaataaaaaaaattagctgcccatggtggtgtatgcctgtggtcccagctacttgggcagctgaggcaggagaattgctggagtacaggagattgaagctgcagtgaactgtgactacactgctgcactcaacttgggcgacagagtaataccccgtctcagaaacaaaaacaaataaacaaacaaaaagctaaataagttgcagacagcagtcgcttcactcctaaacacttaagcaggtgtgtcatccttgaattactgaattagagttcagtatttgcttatgctagttatgttagtggtatgctttttaaaaataattaaggtgatgtcatgataaggctattaagagccaacatgcattgagtatggactttctgccagacattgcactatgcacttaacacacagacacatattgttttttccattttaagatacagaaagtgggccttaaaggtgctactgacttgctgatatgctttggctgtgtccccacccaaatcttaacttgaatcgtatctcccagaattcccacgtgttgtgggagggacccagggagaggtaattgaatcatgggggctggtgtttcccatgttattcttatgaaagtgaataagtttcataagatccaatgaatttatcaggggtttctgcagtttttctcttgccaccaccatgtaagaagtgcctttcacctccaccatgattctgagacctccccagccatgtagaactgtaagcctgattaaacctctttttcttcccggtctcaggttatgtctttatcagcagtgtgaaaatggactaatacagtgaattggtaccagtagagtggggcattgctgaaaagatatctgaaaatgtggaagtgactttggaactgggtaacaggaagaagttagaaccgttgggaggtctcagaagaagacaggaaaatgtgggaaagtttggagcttcctagagacttgttgaatggctttgcccaaaatgctgatagcaatatggacaataatgtccaggctgaggtggtctcagatggagatgaggagctcgttgggaattggagcacaggtgactcttgttatgttttaacaaagagactggcagcattttgcccctgcgctagagatttgtggaactttgaacttgagaaagatgatttagggtatctggccgaagaaatttctcatcagcaaaacattcaagaggtgacttgggtgctgttaaaggcattcagttttataaaagaagcagagcatcaaggtttggaaaatttgcagtctgattgtgcgatagaaaagaaaaacccattttctggggagaaattcaagctggctgcagaaatttgtgtaagtggcaaggaacctaatgttaatctcgaagaccatgaggaaaatgtctccaggccatgtcagagactttcacagcagcccctcctatcagaggcctgaagtcccaggaggaaaaaatgatttcatgggcccagccctgggtccctgtgctgtgtgtagcctagggacttggtgccctgtgtcccagccactccagtcatggctgaaaggggccaaggtatagctcaggctgtggcttcagagggtggaagccccaagccttggcagcctccatgtggtgttgagtgtgtgggggcacagaagtcaagaattggggtttgggaacctctgcctagttttcagaaaatatatggaaacacctggatgccccagcaaaagtttgctgcatgggtggagccctcatggagaacctctgctagggcagtgctgaagggaaatgtagggctggagcctccaggcagagtccatactggggcactgcccagtggatctgtgagaagagggaaagtgaactaagctctttaaacctcatatgtttccatcagtaacatgggaacaatagtaacaattccacagagatagtattgatggttgaacaagatgtttaaatcactagtaaaatttggccagacacggtggctcatgcctataatcctagcacgttgggaggctgaggtgggtggagcacctgaggttaggagttcgagactagcctggtcaacatggtgaaaccccatctgtactgtaaatacaaaaaattagctgggcatggtggcaggcacttgtaatcccagctacttgggaggctgaggcaggagaatcacttgaacccggaaagtagcggttgcagtgagccgagatggcaccattgcactccagcctgggtaacgagcaaaactccatcttaaaaaaaaaaaaaaatgcccgccttattcagatacacagtctaatgctttccactagaagattctggcactgttagcatctctggcataaactatgttactcaacccagttctgtcgtcgtcatttttttgtgttggctttgcccttcccgcattgtgacttgatcccatttaagcagcaacctctgcacacacaatcttttctctgtccttcactcagtgatgttataatatctagaggcttattgattatttgtttgattctattgtgggcacaggagcagttcttagattaacactattagattttcccaagcagtattgccgtggtttatacaattggacgaaatgggtgatctaatttggactcaatttgctccaaagtagagttggaggaaggagatgctgtgatttggttctgcacctgagaacaagaatggaaaaagttatctccaggtgctatctgtgtgcctcatcaattttggatacactgtgtgaccagctctgaggattccaagcttttttgcgtggcttcttacctatcagctaaagaacctagctttacttatccaacttagatattaaatcccatgatataatttatttttccgtgtgaaatatctcaggaacaaaaaagtcaggttgagttttctaaaggcactggtttaagaggctataggttaagaggagataacagacatgctcagaaacaaatcatttcctgatagctgtttcagatggaaccaaatggaaaacagtgcttctttccgtttactgtacaccccctatcctggcatctaaacatatttgtaatcatactgtctatagaagttttggttctgcttttgaccttaacactaaaatacccttccacaatattataggcttttcatgtacatcgtttttaagatggctataaattccacttagtggctatgactgtagttttttttttaactcttcccctaatagtgaaaatttagattgtttctaaattttccttactataagtaaggctaaaaagtaacatgtgaatgttttgaatcaataaatatagtatgtattaataatattgagctatttcttaagattacattttcagaagtaagatcactgagtcaaagggtgcacactgtttaaaggagcttaaatatattgcaaaactcttttcatggtctgctgatatcactgaaaatggaggtctggattcaaatcacatgtgccaactgttctactttggcagaattacctactgctttgggcctcgggtactaaatttgtgaaatgggaaaaataatagttcccacctcatagagttgcagtggagattgaatgagtttgtagataaaaagcgtctgcgttgtgtctggtacatggtaaggggttcgtaaatactgagttatttcttattaacatttattattgtctccactggaagaagagcctgtagaatatgcagactattcaaatgcttcctttggtccattgttgtcctttcttttctcttctagaactttccccatagtcatgcatctgtccctgggttatctgatatgtgtttcagcctgttttcccaagtttacctgcctctctgagaagcccatcagccctgagagatacctggaaggaaagaggaaaatgcgtgattcaaatcatgttgcaagtggatgaatctagccccaaacaactgggaggcaactactcctgcctgccgaggcctttttttttttttttttttttttttttgagactcactctgtcacccaggctggagtgcagtggcatgatcatggctcactgcagcctcccgggctcaagctttccacccacctcagcctcctgagttgctgggaccacaagtatgcaccaacatgcctggttaatttttgtggttttttttttttttttttttttcctgctgagatggggatttcaccatgttctccaggctggtttcaaactcctgagtccaggtgatccacccatcttggcctcccagagtgctgggattacaggtgtgagccactatgcccaataccccctatgtagacttttaaagaaatacaggaaacagccaagactggtgtcattcagatttagcttgggagagtctagtgggtgttaggttcccacaggatgaaggatcaccatgaacggtcaggacctgacttaggaggactcagaagctggagactgcagaggatggcacagagttccaaatctttggggtgtgtaagagtaggagaggcaggatgggagaggatgggagtgatgccacataaatcaactctgttgcagcctccggggccacatcagtagctgcaggaggaggagggaacagggagacagggagcctttcttcctttcctcacccccagttctgtgtttatacttctcatttagcccataccccactatattaaaagaagatgtataagtgtatgtgtttaatctaccattccttgtggcacagtgcatggtctgcatggcacagtgtgtggtctgtatggcacagtgcatggtccgcatggcacagcgcgtggtccgcgtggcacagcgcgtggtccgtgtggcacagcgcgtggtccgcgtggcacagcgcgtggtctgcgtggcacagtgcgtggtctgcatggcacagcacatggacatgattcatacatgcaagtgaatgagtgaatgggcgatttccagactatccagaaactgtgccccatagtcctacccgtaggaatccaacagggaactgtcaccaccgacccgaggcaggaaccatgtgctctgagccctggccattttgtgtagatggagataaattgtcattgctaattgccagagaccaggtcctggtggtagccaaactgttccctagggagttctcaccaaccttgcaaaatgagatggcagtcttcatcgtggatgcaattatgtttcattgttaaccatcacaagcaacgggacattatgatgactgttataagttggtttcacatgtaaactttgacctcagagcaatggggcaggcttttcccaaggaccctgttgagaggttcatgatggtgacaaaaagcacaagccccagctgccaaggaggctgatatcgggagaggcagaatgtgtcttttctttcttcttcctcttcttcttcttctttttgaaaccatgctcattggttttaggaatcattagcatggtgaagattaaagctattggagatagcacagattgtttcattttattatgttcaattggattggatccgagccatttgcaaagtgcagtattaccataagaagggacttggaatgtttgtcacataatacttcttcatggagaaggcagtttcttaaagaaaaaaaaaaaagacaacttgaaatagcacagcttttttccactttcaaatgtataacaaaatagaactttatatttccagatggactgcctggaacccggggagtggctcagctaccaggctccagtggcccttgtcttgttatttcctccattagagacctggcgtataattgtgggagggagaagccagtggagcagtcaggggactccctggctgtttctgtgtctggtcttatgggtctgggcactgaattcagtcacaaaccctagcatgctcctttgctacctcaggggacaaagtcaagaaaataacactaggattgccaccctgctctctctctctctctctttttttttttttctttttgaggaagggtctctctctgtcacctggctggaatacaatggtgctatcttggcccactgcaccctccatctccctggttcaagggattctcgtgcctcagcctcccgagtagctgggattacaggggcacatgccaccatgcccagctaattttgtatttctagtacagacagggtttcaccgtgttggccaggctggtctcaaactcctgacctcaagtgatccaaccgcctcagcctcccaaagtgctgggatgacaggtgtgagccaccacacccagccactctctttcaactagaacagttcctctcttctttgttgcatatttttgtatttcatgcaaggtgctgtttatgaacaagggagtttcctgcagctttaataaagaagagaaaagaaaagaaagaaaggaaaattcgcatgttgaaaacattgtactaatcaaaaaagccagtcacaaaggaccctatgttatatgatttcatttacatgaaataccccaaagaggcaaatctgcagaaacagaaagtagagtggttgccaggggctggggatggggcgtggatggaggcatttgggattaacagctaaagatagcaggattccttctaaagcaataaaaatgttgtaaagttgattgtggaaattctttcacaactctttgattgtactaaaactttgaacactttaaatgggtgaattgtatggtatatgaatcatatctcaacaaagctgttaaaaaattgtatgaaaactgtgatgggattcaagtagtctaacgctcaaatttcccaagtgccctcatttaagtctggaccacgacaggaacccagatgtggcctgagtagcacatcgtggaatgggcctgtcacctctaccccacacatcctcctgctgttaatgccccctttgaaagccattagctcttttgataaccacagcacggtgttggctctcagttagagactcagatttatccctgcccgaatcattttctttgattctctgcccttccccactacagtgtaaactccatttggactttctctagttcactgtgaatggtttttgaataacatcaattagcataacctcatgcccagcatcgtccttattgttgagagcacagcagtgacaaaggtgcaactcttgctcttgagcgatcacagtttatttggggaacctggtactacctaataaaaccaggggagactcgacccaaggcattgtgtttgagctaggctttgaacaatgtatagaccctcaccaagtatggaagtggaagagtaagacattcaaggtagaaggaacagtatgaggaaagtcagagagctaacaaagattatagtgtaatgccagaatcatgagaaatttgctgagaattcatttgaggccataatttaaaaagataggaggagccatgtgtagaactttcacagaacagtgtgtacctcccctccttcttccttattagtcgtgattcttggggggcaactaaacccagcttttggcaaaagggagtatgttggttcatgtaccaggaagtcttggagtgatggcttcaggcacggctggatccaggggctcaaaaatataatcagatgatttgtttgcttctgtcttttgctatggtggtctctgttttgcttacttctgcagcagattttctctacctggtgggagaaacagctgccagaaaatccagattcccattctcatgctagcttcataacagcaggagagctcctcactctgtttcccagggtgtatatatatatgtatacatatgtatatgtatatcaatatatatatcaggtaagattctagtccagtgtgagccatatgctttattcctgagcaatcgctgtggtcaagagatagactttttagggccgggcacggtggcctacacctgtaatcccagcactttgagaggctgaggcgggaagatcacttgttgaggtcaggagttcgagaccagcctggccaacatggtgaaatcccatctctactaaaaatacaaaaattaggtggcaggcacttgtaatcccagctactcagaaggctgaggcgggagaatctgttgagtccgggaggcggaggttgcagtgagccaaggtcacgccactgctctccagtctgggtgacagactctgtgtcaaaaaaaaaaaaaaaaaaaaaaaaaagagagagataggctgtttaacaggtgtcgtaggtcatgtatctacagccatggaaagagaatggagcactctaatggatccctgacgggtcaaatggagcaaagtgtgcttcccagaagagcataagaaaaaggaagggtactgggtggaccaaatctattgttacaatatcccttatattccttagggttcctttttttcaagttaaagcattgagtcatgtctctgataaatcgcccccccaccccgatccccaccctctgccgccctggccttctttttgtgctgttgggttccaaactttacctgaggattttcacatgcacatctgttaaatgccatttaaagagaacactaacaagagaaagctagttcatttttcttcctgggacctcagtttcctcatcagcagaatcgggatattagtgcagaccttgcaggctctttatgaggatccatcgggagcctcaggcgcacactcggggagcattggagctcttcccaggccgaggtaggagtttgtccacctgctgtttactccgaaacttcttgctccacctgtcactttagaagaccctgatctgccggaaggtctccccgtatacccagcagcccagacctctcaggaaagagcaggctgtcgtcctgcattggaggaggaagcttggggcaggtggcagagcaacttcatttccagatgaaactgggctccctggccatcagctgccgtgcttggaggggcgttcagacaaagagccaaatttaaattcatgtaatgttgctgtttgtaacattgaatacttaagacatctgctcagagtctcgcattataaatgaatggaaaggatccaggagggctttattggatgggagccgtgaagtgagcgccgtgtatttcaaagcaggatcttaatcagacattatttatatctataatattttacaaattaaaagcagtagaaatagtcactggaaggaagtcagcaagcaggggtgaaaaaaaaaaaaaataaaagaacctgaagccgccaagagaggctcactgaccatctctgggggagggagggtgaagagtagcaaatttaccgtcatcagcaggtgtgtaaatgttccatttacattgaatggcacatgtcataaagtacataccgctgcacatcccaccctctgtttctgtttcaactgcagagcctatttttctttcccttccagctcagctgccttctcctccctgacctcaggtcacccaagactcccactttattatttccttttacttttagttcattattctctgtgattcagtggaaacataaaaaatggtttttaattttaattaatggcaaacttagaacagacccatttaataaatctgtcctctgaacttaacacgtctccccgccttgtaagggctgcctgtcattttattagcgctggagcctcccgaccgaagggctgagtaattgacaaaaactgcaggtaaggcaagaggcccgtaattgattcataagatcccttcctccgatcgcattgaagagttaattatttttcctgcagttgggactcagctgttgtttcccctgggattaaacagctgtcagcattgttaatgacatcaaattcatgcattaaaatcctctcattcccttcccgtataaggtggggttgcggaaatctctgccacgtccgcctttatgaaggagtgaaatcctaagaaagataaaggcccttattacaaaaccacagaccggagcttgtgttgatggaatctcgtaatgagtaattaagccgctttgcagaagtccgggctgtcatcctggcgtttgggtacttatgttccctagtggagacagccgggtagactggggaaggtgataaaagggagaaaaatagaactgttctagaacgatctccacttttaacagcacaatacagagaacagagctactcaataattagccaaccaagtatgaattctcatatgttcttaaagtatctgctgatttcttcaaacatctctaacaacatgtctgatgaatacgaagcctccctttatttatttattttctttttgctttctttttttgggggcagggggcacagtttttctttctgtctcagtctctcaaactgtaggaggaccaacttcagggttttattttgtttgctttgctttgccttgtctggtttttcaaagtgctcttttaacaaatgaaagtttaaagcttgagttcaatttgagtaatttgttcccagagaaaaagtaaatgaaaagtatttctgggtatttttaatgacacaagtttctgtgctgatatgcgggcaggggttcgggagtgggggcaccagggctcatgagccgagagcccctgcttcccttggaaaacggaaatttctatctccaactagggaaaaatttgcatgtgtagaattttggttttttcttcggcgtgtttatttaatttaacattacctatcctacgattatttcaaggtgattttattactagtcagctttcttttccctagcacaaaactcatgcaacatttatgttgaatgtttaaaattcttttctaaatggtttcacctttctgaaaaaatcttgcattcaaaaagtgtaaaggactctcctcatttctgcgcttgaaagtgcagtgtgatttcacaaatcaaacaatatcaggaaaattcaatctcgttaatacttttggagggaaaagaaggcaagcgtactcttcagagaacggattcttttggatttgtgttagagaaaaactgtctctaatgaccgcacagcacaaagcaaagcagttaaatgaataaccgccttccagtacagataataaagcaggggaattttgtgtgtcacatcaataaacatcttaattgaacagtacgtgggttcttccctagtacctgccttgctatacactagccttggaaagagtcttggtaaattgttcagcctcaagttccacaacaaaatgggattctgttttctagaacctggcctagttatgatgtgatgaatccgtctctgttaaggttatcaactttaataaaccatgtattatttccttaaatattgtgcaatgtgcagggaattatttcagttttgttttttatttagcacaaacctaaatattacacgtagcaaatgtcacccgatgcaactgtctgtcctgaagaggaggacagattattctgtggctacctaatggtgtttacagagttgccactttgccaaaccccaagacccacacttggtctctggtgttgggtccgccagctctccacccttcagaatgggatgtttagggcgtaatcttctgagacccacaacctaagccgggaagcagaggcaatttattaccccagcttcctgtccactggaggcccggggagaccttgaaatgctcagctgcaagtcagggtccaccgatgcagcctcggaatttaatgaggcctctccggacccaaagggagatggacatttctaggcttgtggaagggactccccagcccctcttctctcctggtgagaccgttgttggatgtgaaaaggccttcactattgtcaaggctgggcccctgcttttgccttgttactctgcattttaactctggaccagaattgattgccaccaataaaagatactccagtccttaaaaagtcaacattgttatgttttacttagttatgacttagtgaacacctatacgaattagcctcatctggttcaagggttctcagatgggaccacttttgcacccagggaaggtgtggcaatgtctagagacatttttgattgtcataacttaggatgaggtaatagtgtgctcctgatttctgggggtagaggccggggatagtggttaacatcctacatgaacagggcagacccttgcaacaaaatcttacgtggtcctggatgaaaataacactggaggtaagaaaccttggcctagagggttccccaacctttttttttttttcattatggccccctcccccaggagccttttgagatacgactttcctaatggtctttgcccatgaaatctgaataccacagatgtgctgaatgcctgttcatgtaccatatacacatggtatatgcctcgtaaatgaaagggtgaacagtgtttattccccaactgtcgtccctcaaaaccaatgttaacacccctggatgtattgtcacccctgttgggaatacaccgctcagagaagggttttgtccataggcaacacagagccaattgaggcctttgggcaagcggaggtcatgatggaattcagcctttcagacaattctgccaggcccttggagggtgggaggaaacaggcaagacctctggctcctagaaccgtaaggacccttgccattaggaccaaacctcttccagctttctcagcagccacatgtcaccccctcttccaccctttgccctgccaccctccatcccctgataccctcctgccttttagttgccggtgcttggaaacctttgcaaagtctttttatggagatgccatgtcctttcaatggtgcgtttagccagcgccccgctctgggctccagcaacattagggcattgttattccatccgaatgacaatttcaagctcacgtctttgttgtccatcctcgaatatcctgcaccgttcctggcacagagtaggcactggataattatttcttggatgaaagaatgaacaaatgaatgaatgaatgaaagtttttttccttgcaaatctccctgcacactttaatcttaccagcatcttgtgaaacactcctacttctttctgatctttatttcttacgtagttttgaaatgagaaccgatgaagctgcttttgctcatggtacctcaggtcctcgctcactcccagcactcagggctgtgtggtcagagtctcagattcggagcatgtgatgtgcgtgggcctgtgactaacagccacatggcacgcaatggtggcagcctgggaggctgactgagcaagtaatttctgcttaagcaagaacgtgaggggtgatgtagttgcatgcactttgccatcatagcttgatctaggtctcagcctgggatcttgcagctgcgaaaagcatggcgttgcgtttccaagcctgaacatccacacccgcgaagataagaccatctcttggattaatgtgacgctgaaataaaataatccaaagagaaaatgcctgagacccaccaggagctcaccagatactacttctatcttccccactctaggtctttttactgcaactaccgtttaaaatactttttccatgaggcagatcttagtgctgacagtgtcagtgtctttaatgcctggttcagttgcaaacatggagggcagaggtttgatagcatccaaagtatgcacgccgcactccacctcccatgcccttttctttttctcagggccatcagaaaggaagtaactggcttagatttgacacctctttttttgttcgttttatgtttttgaatctagcatgtataagctcatcagagagctttcccctggcctgggacaatcaggtttcaactgaggctcacgcacacgtcaacacaggaacctttttgatgcctccaggcaatttcctacaagctctaatatcttcctctttactcccatatgtggtatctctggtaccctatatatcattcactcaagtgtttgttttgaaccacttattttggcaagacttcttcagacaggagagccctgagagctcttcaaaggctgggcctgatggtgtttgtcagagaggttcgagctcttaaatttaaatggcctcccacagggaagcagaagtccttttggatcctccagaggcctgagatcctccagatcctgttcatttgccttattcgttatgaccatagaagtttgtggggtggcactctttattctgtcctcgccccacaagcaaagcacacaccagaagctataaggagatgagctcagtaggcctgtcctttactttattttccctattagaatcccaccatagacgccctctctgcatgtgtccttgtctgggggagtcgcttaatttcctttttctttgaggggctataaaatttttgttgttacaaaaatgaaaggggagaggagatagaagaaggaaaacagtgaaagctcagcctcgaaagaagtgcttaaaggaaaggaggttctgacagagggctcggatcatcagcaggggcagggggtgcagggggtgcctgcaagtctgtgaccgtcctgaaggacccccttcctaggatcccaaacatgcactcccatcccagcctcacaccaagctcccatctgggaagcagcagacacacataaaagcaaggaaacttcaaggacgctttttgttttcccctacttttaaaaaattgaggtgaaattcacataatataagattaaccatttcaaagtagacagttcaatagcagtacattcacaatggtgtgtaaataccgcatctatttccaaaatatttgtatctccccacaataaaagtctgtaccaattaagcagctactacccattcctcttccctaccattctaccttctgtctcagtaggtttgcttatttgggatattttatttaagtgggatcatacaatagcatcatgtgttcaaggttgacccacattgtggcatgtatcagtacttcattcccttttatcactgaatagtattccactgtatattgataccacagttggttgacccattcatccatccatgggcatttgggttatttccacctttttgctcttgtgaatccatgctgctgtgaataattgcatatgagtatttgggttcctgtttttaattatgttgggtatatacctaggagtggaagtgctgggtcacgcagtaattctttttaactttttggggaaatatcaaaccgttttccacagtggctgcaccatgttgcattcccaccagcgaagtgcaggggttccagtttctcacactgtcaccaactctgtcagtctattctggcactgctataaagaaatgcctgagactgggtaatggctgaagaaaagaggtttaattggctcatgattctgcaggctgcacaggaagcatagaagcttctgctactgggggcgcctcaggaaacttataatcatggcagaaggtaaaggggaagcaggcacatcttacatcgccagagcaggagcaacagagagcgactggggaggcgctacacacttttcaaccaccgaatcgcatgagaactctctcactgggacaacaccaaggagatactgctaaatcatttatgaagggttcatcctcatgactcagtcacctcccaccaggccccacctccaacactggggattacaattcaacatgagatttcggcggggacacagatccaaaccttatcaccagcgcttgttatttcttcaggtacattttgatgtccctccccactttactctcccctacaccttgaagcaggtgcaatcattttaggctatgaggaccagcatcgaccttcatcagcatctgctctcctttacggccaggtctccttcgtcctccctgctcagaatttcagtctttttttttttttttccctatacagacacaggaagtatatattttcctctcgaatatcacttgggtcttatcttgttttatgctacatgcatgtggcttcccccgttacaaaaagaattcacattattagagaacatttggaaaacatacagaagtaaaacaagccatccccattcccacctcccagagataacgcctgtgttttagttcatctccttctaacctttatagttttttttctatcatattagttaggcattggtttggctccaagtgaaaactgcttctgttattaacatcagcagcagcaacaagaagagagaagtttatgtctgtctcggaatacgtacgtgacaggctcccccatcgaggtgctcagatatggtggccactgcatgattttgctcaggactgaattagaggcaggtgaaaggccctcactccctggaatcagctagcgatggctaaggctcctgtgacggtttctacagaggttccacccagagaggagagtcaaatgggagtttctaccgatgctcttgaaaggatcttgttactcagatgtctctaagacaatgatcagtacccatctctcagagcctgtgtagccgtccatgcttgaggcatgagatgctgaagataaaggtccccagtggtccaggtttttccttctcagcttggaaagcagcaggaaaactgcactgcatttatccaaagggtgtgattggtaagtgtgggtagtgatatagaataaatcaacgtggctgggtgcagtggctcacgtctataatcccattactttgggaggccaaggtgggtggatcacaaggtcaggagattgagaccatcctggctaacatggtgaaaccccatctctactaaaaatacaaaaaattagctgggtgtgttggtgggcacctgtacttccagctgcttgggaagctgaggcaggagaatcacttgaactcagaaggccaaggttgtagtaagctgagattgcaccactgcactgcagccttggcaacagagcgagactccatctcaaatcaatcaaccagtcaatgtgtgcccccttttcctccaactcccaccccaaatccttgctgaatcatacctatccttcacctttataagcatctagtttttaaatctttgctgtgaagttggctgtgtgagctccatttgacagatggaaaaactaaggtagtttgccaaagatggctctttgccttcaggatttccatgtctttattttgagtaaacacttgcactgctaattttattccaacaatgtccttggaatggttttagttctcttggctgtaaccaagtctacacgataccacttgaattgacaacatcacagtcaaacctcaattttcacaattaattgtgccgcagttaattaaattgactgcctggcaatccagtctcaattaaaatactaatagtttatttatttattttgtcttttacgaagcgttttcttttaccatctctcaggatcctatgtaggtatcctgatggtaagaatgataataccatgactgattattccatagttgcaggaaccccacatggcatttcaaatcacaatcagaactttgaccttgaaaggggacccggatcagctccattctcccaaggagactttagctactacctttcttactttttgaataagtattttgcagggcttattttcatcatctggaaaggaggaatagatagggttatcttgaaagtcctctcttggaagggattatggttctgtaatcctgtaggactggactcagtgggtaaatgtagaggtgatggtatctccgtttttattgtcttcagaaatgttgagatcgagtgatataaagtcacagggttggccccacagtttagttcttggcttatgtagaaatctgtgctaagaagcgctgtgttgcgtcatcatggggcatttttgtatgtcatgcagtcatactttgcagacccctgggagcctcattcgagttcttcctgtggagtcccatgccttggtgttgaaccagtgtcctagctgggaggaccgttgtactgcagcactttcctaaactctgcatgtggtctccatgatgtcctggctgtgttagcatcagaaatggctttgcccacatctcccaactctgccctcttattaggatttctctgcgctggctgatgcctgagccatctaatgatctttacgggaataaccaaaaatgctgggtggggggggaaaacgccagcagatctctttagggcagagtagggagggacacggacaatgtgggcagctgtccatgcagcacgtatcacatccaggatgatgtttatatgaagcatcatttttttttttttttaggtggagtcttgctctgtcatccaggctggcatgcagtggcacaatctgggctcactgcaacctccactttccgggttcaggtgattctcctgcctcagcctcccaagtagctgggagtaaaggcacatgccaccatgcccagctaatttttgtatttttgttagagatggggtggccaggctggtcttgaactgctgacttcgagtgatccaccggccttggcctcacaaagtgctgggattacaggtgtgagacattgtgcccagcttggagcatcttaatttaagccctctacatccctgcacggtagatacaaccagctccgtttccaaggacgaggagcaacagagtgaggtcatttccctgagttacactgaagatggtctaatttcaaagtccttcctgtgtccactttgccaggtgccccccgaaaagcaagaagactccttcaagcatcctgaagatttggatgctacaactgtatgtcctgctggagagaccctcccagaacattgaaggctccagtgttttgactggcagaatctcagtttcaacatctgtctctaagggctctggacctatgctgggtgaaacgtgttgtctgtaggatttggcccatctgagcctcactggggatgggctaaactccgtggggtttgtattccttctccttcattgctcagaggaaaagaagaaaaaaaataaaaagaaacgaccccaaacagcctctttcgtgcacacacgcctaagaaataggaacatgaatttgcattccttccaactggtgtgtttccaaaatacagacaggcaagtttgaatcactttgactttgaaagcgtgattttgagcaatcatctggggaaaaaaatacctcctcttcactaaataagtctgtcaaaaagagtcatagtacagcgtgccattgccagaatacacgtgtgtgctggtaagctggccccaaccaattaaatagtgaaatgtcgactgcattcaggcccttcctggtctgcagacagacttgtgttagttcattttcatagtggtgtgtatgtatctttagactttaactgacagattcccacagtgagtagagtagggagttatcaattacatggttagctaggcgctgctattgtatgctctatggcttcttgacaggagcaggcagagaaggagggaaggactaatatttctggtgcaggaggactgttaatattttagaccgggctcctcaaacatgtatgcttatttagtgaggagaaaatgtgcatttgaatcctgcaaaccctcgagaagtttgcattaataaatagtgattaccagaatattctcttctaaaatatattttatttatcaaatgaatacccttctgagcccctctttatccttcctgtgatggctaaactaatttcatcaaattttgatttctgtgtggtgatgttgtgaacagtgcctgaaataataaaattaccctgagcagattgcatataaaactgtttgcaatgggagaagcagtctttggggctgtggtttcctttggctgcagtgtaatatattcctttgtttcttttgtgaagtatttattgtgggtctcctgtagtctgagtttcttgtggaagtgggcttgtgttttgcttttgtagactgacactgagaatagcatccaaacatctttttcccaccaaggcatcaaactccatcgttaggaattccttcatagaatcaaagaatcagaaagagctgaaacatagaccacggacactcaaattgtttatcctgaaatgaatgggaaaacctaagctgaagaaaggaagtgtctggccaagaagctggcgggagagtagaatcaggaaccagggcctcctcgtatctggtctcacgcttcttccgtggtgttctttcttaagttgagcattgcattctccttggataggatggatattttcctgggaaggatgatacatgatgtatttatccataaaactgaacaggtgttatgtgtgccttttctaataggaaagaccatcatgctatgaaaagagaggaaggggagaagaaatggggtacgttaagatctcagaatgagttgtggggctaaatgttcagcctgtctcccttttctccttgccacaccactagattatattttctagactctcctggtgttagatttggccttgtgacttccagccaatggaatcggctgcaggatgaaactagtcttgatccctgaatgactgcgtggagcacatctccttctggtcaataaggcatttcaggagtgagagataaacttctattgtgttaaacccctgtgactttgagacatatctcctacagcaggtggagttagcttaactaatgcagaacgataggactggtgaagcagtccatctgttatgagagctattctttttttttttttttttttttttgtgagatggagtcttgctctgttacccaggctggagtgcagtggcgcagtctcagctgactgcaagctctgcatcccaggttcacgctattctcctgcctcagcctcccgagtagctgggactacaggcgcctgccaccatgcccggctattttttttgtatttttagtagagacagggtttcactgtcttagccaggatggtctcgatctcctgacctcgtgatctgcccgccttggcctcccaaagtgctggcattacaggcatgagccatcgcgcccggccagagggctattctttgtcttttatttgctttgagtccggtataaccatgtggcacatacccctgtacatgtttgccaagactgctatatggcagagcttggaattcttaggagctttatcaggtaattgcaagtcccccacctccaagaaagcactctctaggtcaagaatcagcaaatgttttctatagaggcccgtaaaattaatattttatactttgtgggtcatatagtctctgtttcaattacccaactctgctgttgtagtgcaaaagcagctgtagacagtaagtgaatggatgggtgtggccgtgtgccaataaaactttatttacaaaaacaggcagcaggccagaattagccctgtgggatgactcacatgagcagagagttctggcatcaactttgttcggagagatactgacatacttctactcaagtaagtcaatgtttctgtctcaactggttgattggaacaacatacaaactgacccttaggaaccttctaccaaaaatatcctgtgaatcttcatacttttgtaataccgtttagttagaagtggtcagactttcttcgtcctcttttcgtgatttcctctgtggtgtctgtggatcgataccggcagctcaggtaaggaacgtgtgcaggggatgtaacagaaaggagaaagacgaggaagaagggtgcatggagcgtgcaggggaagaactgattcttttttcagttaatcggctcatcaaggttctggtgttgaagtctgatttcatttgccatgttaagaggatatggacagatactgggcaaaaggaaaaaaaaaatattggatccttgcccagctccaagtgttgctgagtcccttgccccctccaccccgctctgtcaggagccaagctctggccgcccagtttttggactttgtaactgtttccgaacggatcagattccatctgaattgcagatggctttagccccagcagcagaggctgccatgacatcggcatgcgatttcttccaggacttaactctggagagagctccatttcctgttgatcatgagggttttacaggcacaaacgctgtcttctgtcactctgtcacagtgcattatgtcagaatagaggaagcagttcagcccgtaaatctgtgccaccggcacgcagggtgttgtgttgtctccaatgtgccttgtcaacaccacagggctaatagcagtgtcagggtccccgtgccatgaatcacttcacatctctggctagtacagatctctccctgtcactagtggaagtcgcctgcactacattcagaataggggccaggcgcggtggctcacgctgtaatcccagaacgttgggaggccaaggtgggaggatcacttgaagtcaggagtttcagaccagcctgacaaacatggtgaaacccagtctctactaaaaatacaaaaattagctgtgcatagtggtgcatgcctgtagtcccagctactcaggaggctgaggcaggagaattgcttgaatccaagagatggaggttgcagtgagccaaggtcgtgccactgcactccagcctgggcaaaagagtgagactccatctgaaaaagaaaaaaagaataggcacagacaatttacctggatcctcacattgcaatgctgaccactccggaaggagtgtagaagttgcagctcatgcctgcattccaaatggctgccttctgcagtcccgtcagccaggatccctctcatacaaacaccttgactggccgagaaatgcagatgctgtgtcaaaagttcatggctcagagccaacaatgcactgtgctgacctccaattttccttgaggaggggcatcccagggtcagaattttatgcaatgcaagcttgtccacgatggcatgggagcgtgtgggaatgtcaagatgaaccggggctccgggagacatttatggagtcaggagcacacatacattcctggttctgtcagcatttccctaggcgagatgagtcacacatttatatttttacatatgcagcgcgcttgcaattttccactggggatgatagaaaaacttattgaaaatagttaatcagttttacaaagatgccataggtagaggtgcttccagacctatagttttgaaagtcacctagaggataccagtctgactcagagctttatgaaggcatattcctaatatcctccctgtgctccacgaagaacaattggtttggacatgaactggtttccatttttagactccaggcccacagtattctaagtaggttggggctgtgctgattgtaccactctttggattttagtggattttctttttaggatttcatgtaagtaacctgtgcagagagtgaggataaataagaacaagaatgacaaaccgataggctacttgacatcattccttaattccaggtcactggcggacatcactcattcatcagtactctgtttttctcccaagaatggatctgactcttgaattctctttaatagagtgttctgggaggctgttaccaattgaccagggttgatgcacatgttgaaacatctttgccatttcttgatagcttcagaagagattttaaagtactattattttgatgttgttagctttcaaagattaattccacagagatttttgggcatctttttgataatacacattatgcttgacttgggagtttcaggatgcgcaagagactccttttgactgcaaggactcagtaaaacaaagtatttcaaggtcatgctacaaaaagtcccaccaagagcatggtcaggaggtacagtgcacttacccacacggagcagagagggatcagaggaggctggctggggaaatgatcctagggctttcttaaaggacacagcgccatggttatttaagtacagcttttaaggagaactaacttgccactttgatagcagtataggactccaatatttctcatttgtaattttcagaagcacacgggaggtctttgaaatttaatgtctccctgcatcacaaaccaaaagacgagtcagtttataagtaggctgtgcttattaactcagtcctggctttattgattgctttaggttccatgatctttggcatgtgagtggttttgctttgttttgacaatgatctttttgtaccttgtatcgggtaggttggaatgtgtttgaaaatttaagaatattttcctagcaaaggcaggatttttcaagtttgttcatgctggagctcctgccacgtattttgtccttttttcttttttctagcaactctcgagaggatgagacaaatggattgtgaaactggaaggagggtttctcattttttaatccattgttttagtgagagtttaaagctttcctataaaatatgtgggttgagaaaaattggaaaagacctcttcaaggactttcctctatgctccctcatgtttcaagtggcttttttgcatgatggtgcatatgtctttgtttctgtacagggccctccatgttcagaggcagagtaacgtgaattcatttcgcgctaatgagagttgcgatatgtcggcccaaactctctgtgtccttttcttcttgggctgatgaacttgtcaacttttaaaaaatgtgctctccaaaaatttccagcaggactttcccaccttgctgtttaaacagtgaatcagccctgtgggctttgctgcttacaacatgattccggtgaaaccacaggtctcgtcatgtcccttctgtatccatggtagtcccagtgggaaagaggtaacaaacccaaattgagtaatttcaagaaattttaataacaaaggggctattttataaagggggggtggtcaaggtgtagggaaacataaaagagagcgaatttctggtctggtgctgtgggtcacgcctgtaataccagcagtttgggaggccgaggctggtggatcacctgaggtcaggagtttgagaccagtctggccaacatggtgaaaccccgtctctactaaaaatacaaaaacttagctgggcatggtgacaggcatctgtaatctcagctcctcgggaggctgaggctggagaatcacttgaacccgggaggcagaggttgcagtgagccaagatcacgctattgcactccagcccaggcaacaagagcaaaactctgtctcaaaaaaaataaaaaaaaaaaaaaaagaaagaaaattaatttctcagaggtagtaataggggtggctgtcaccatccttggccaaggagagggagcagatactggagacagttgaaggtgccaggatggagaagactccttggaaggagctgtaacctttggttgaggaattcagcctaccactggtaatactccctctccccaggagaggtcccagcggaataaacatccccgccccttcaactctttgccattgttcaagccctgctagaaaccagatggcaaaaggaagttactgatgtgttcatattggtcaactttttcaggcacgaagaccagtacagaaggatggaaagtgcatttgggtagggaaatgggagattcctgcatagctgtcaagttagtttcttcccagagagaaagaccggtggctgtagtctgtgccccactcccagcctgtcctttctcagccgtggcttgtgtgcatccctggggccagcatgttgctgcgagccccaatcgatcagtggagaaacgagctctggtgggcagtcaggcaaagcagatacacgtgcttcttttcagctttgttggaaggtttcattttgcttcaggaactaggcaggagaattcctgagttcctgtacaacctgagttctctgttaaaacaaggaggaagtaatcatcctgagttcgatgattcagagtaagccatttaacttgtagagctttgggactaacaatgatccctttttggagtccttaattactaaaattatcagcatatttagagttctgaagatgctgaacccttattgtatctccccagggttagtgagtaattgggaatagtgttccatcttggatgcccccatccactaaccatctttcctcttcgggtggttctaagaattctaattcaattagaaggccttctttttagtttgattagttcaatatcaagagctaaatacattagcttatatatatgtctgatgaactcatctttgcttccttggatccccaagatagaatggccctgatgcagtcaaaccaccctgcagaatcttaacagcaccacaaatattgcatccaggcatcctgcccatgctggcttgcaggctggggatccctgtccatagcgcccatggctccaccaccagtcaaaggtagtggggccagcagtggactcctgtgtggttcagctctcaaaaatgtgaactgaaagacacagaaaaagacttgtgtttggggataaatactgagactgagcagtcttgtggattcaggaattgggcatccagttgggaccctttgcaagaagggtgttagggagcagagagcatgagtaagccagaagcagagcaggagagagaatggagcaggtgtgcaaagagggcggtgagatgctgagagtaatggggctggcccaggaggaagtgagaggaagcaaagtgagacagaggtggtgtgtgagcgtgtgtgtgtgtgtgtgtgtgtgtgtgtgtgtgtgattgagagagagagagacagatggagggaaagagaggcgggggattccaggtacagtggctcatgtctgtaattctagcactttgggaggccggggcgagcaaattgcttgaactcacgagttcgaggctagcctgggcaacacggcaaagccctcatctctacaaaaaatacaaaaattagctgggcttggtgacagacgcttgtagtctcagctactcgggaggctgaagtgggaggatctttagagcccaggaagtctaggctgcagtgagccatgaccttgccactgcacaccagcctgggtgacagagggagaccttgtctcaccaaaaaaaaaaaaaaaagagagagaggttgagctcaactgatcagcatctcagattaagggcctccattccccccatgctttgtaattgctgcctgttttccatgaagcctgactgtgcattggttctaagtcatgggctctgcaagatcctccttgtgccttgagaagggccctgtccgcagcctgaggagcctcaactgttctctgcacgacctagttctgggctagggaatggctgtctagcttcagtggatttccagagtccggagctactaaaggtcaacagctgtgttactgcaaactctgtggcctgcattctatcaatgccaaaatgcacatcacactgacaacagctctttgtttacaccggggagcccccaaagccccagggtaattccatcaccacccaagttgtaagatggtagagcgaacaggccagaatgtgataaagtaaaatgaaagaagaaaaaggaggaaggaaaaagagagagggagaagcacatagaggaaagaaggaagaaggaaggaggaaggagggagggagggagacagggaaggaaggaagtctggcaagagggcacagtcagacctgccaggatccctctgctgtcttaatcaagctttgcctcagtctttctggactgaatttgtctctgtgttcacttggcattttttaaaaggagacaaaacaggtgatgaacacagcatgagtgatttttcccttaagagagaggtgtcatgctgagaaagaagaaccgacctccaggggagcttgtcttcagaccaaaaccctggcaaggacagcctgtttggatcttggtcattttgttagatttataaagtgcctttgaacagagcaggacactctggggacaagtcaaagcatggcagccttcagcttcccaaagaagagttgtggagaaggaaaagtgaaggaaagtaccttactaagtcattgatggcacattcagcccttgtcaaagtcaaagaagaaatttggagaaattctcaccactgtgcttaggagtcaccctgaactatttcttggatgaaattaccaccctcccacttttggcaatgagacagcaagcttggaatttggagtccatgttaaatccaggtcccagccaggcacagtggctcacgcctgtaattccagcattttgggaggctgagatgggaggatcacttgagcccaggagtttgaggccagcctggtcaacacaaggagacttcatctctataaataataaaaaaattaaaaattagctgggtgtggtggtgcacacctgtagtcccagctactcaggaggctgagatgggaagatggcttgagcctgggaatttgaggctatagtgagccatgattgcaccactgcactccagactgggagacacagcaagaccttgtctcaaaaaaaaaaaaaaagccagattctccacctaccagtggtggggccccttgggtaacttgttttcactccctcagaacctcagtttcctttcctatacaacgcaagccataaggttaacccctcctcgtggtgatgttaagatgaaacaggaaggtgaggggcttaacacatttccgtgttcccataagctttcaggagatcttggtagttttcatctcggtgttcattaccatcatcactgcttcagactcctgtccatgtggggccctgtggtcttgcgatcacctccataaatgttcctttgttcccgcctaacacaataccagccacaaaataattctcaacacatattcattagtggatgcaggggcgaaatgaaactcagggggttgggaaactcacctgaaggatcttctccctctccccactttcaggctctcctttcacatgcatgcattaattcgttcattcttggaatctacacacctgtgatgtgctagttactaaagatgtagcaatgagtgaaaggtaatcctgtccttgaggcattcacaggtaaagaagcctgcttgggacattgggccgtgagctccaacgatgtcactattcttctaggctttgtggacctttggtcaccccttctgtaagaccaactcccttatctgcctgtacagtgttctgcgaatcccggtctctactaaaaatacaaaaaaaaattagccaggtgtggtggtgggtgcctgcaatcccagctactctggaggctgaggcaggagaattgcttgaatccgggaggcagaggttgcagtgaacccagattgcgcctctgcactccagcctgggcaaaagagtgacactctatctcaaaaaaacaaaacaaaacaaaaacaatttggctccagtgagctcattttacgttgtatgtaccagtatgcaagtgttgtatggatgtgagcgtctgcgtaggtttttatttttctctctcagaatgaaaggtttgattcgtaccagctccccatcccttcccatgatcccatcttaatgtctgttgtggaagttggcccacagaagcctcaagcctaaccaacaagaaagatcacttcatatgcattagctggaaggtagcaagaggaaatcgcctgccagggtccctgactcccggaggaaagtgtcctctgagccctccttgagggacataaatagcctcaaaagtcactgaatgctaagttggctttctccccaaaccttctaagtaggcagtcaggatttaacgacccgcaaatttccaattttttagtttatgaaaaaatatatctacgtataatttttgcctccattagagtctcatctttaaaaaaaaaattattcagtgacttcctccctctctttccaatgaggaaaactggactatttatgctgcattttaggctttttttcatatataatttttcatataaatgcacattttccccttctttcggggaggaaatttaacttttgtggaaatgtgatgtgtgtttaaattaccaatttcataggcaatatgtctgataattgcagagagatactgagttaacttgtagcaatgagtttctgtgacaaagggaaatcagtttgtttgcagtaagccgaggataacggcgccgaaactttactatttgggggtggggggaggttggggaagggaggccctgaaattgctttttataattaaaaagggaatctcagatgttttatatcttgaatatttacaataaaacctttaagtgcttgtcaagagggtaatgtgtcattaactggggactctgcctcgcctctcctctcggacatgacagtgcggctggataagagaagagtaattatagttaagcagggctgccaggtgtgataaatgactaatcagcacgcaggagcctcagtcctcaaaggaggactattacagtgttatcagctgcgggcctgggtgtacggagcccggaacagggatggggacaggaccttgcgctgtgcggcttggcatgctgctccagagtgagcccatggctgtctcttagttttgtcaccggcggctttatgtggctgccacggggggacaggaaacacacaggggctccagcaatctgcctggtgctaatatttatataacacactcgccagactccatggcctgagtccgggggtggcttttcgtggtgcagcttggatggcatcggaacctgcaagaagccaagacgcctgttctccacggcggagcccgctggtcggtcactcctgttcctttcgtgtccgttgggtgcaggcattatttccagtgtatgtgaccgcttcccccgtgggaacagtgtggcattgttccctgggcaagccaacagctcagccctgtcctagagaaccctggagctacgacgagggtaccctggacccctgtcctaaatgttctttgactctgcttagccactgaggatgtttgcatttgattcatttgcttattatgatcaagaaacgttacctgtcaacattggataaaccatccgagggaaattaatcaaaacccccttcagacaaactgcatcacatcgattctctccttataggccttcttgttttgtgttctctgtgtgtgttttttttcccctagcgtgctgaagggtggcattggagtaccatttaaagaataatttttaagaaatgaacatcaggacatagacgtctgaatatgaggaagtgcctcatgtgaaaaaggacgtaatgtgctttaaagaaagaagaaggagataggacgacacttttgatacaaaggttatttttataatacttgcatttttatcggttcacgtattttaacagggagccctgactgaagtcacaaaaattatgactccggcaccgaggtacttatctgacaaatgcaatgcgaatggtcttgttcttatcaatgagatcagatttcagaaatgaatgtgaagaccgaggcgttgctttgtgcacagataaccttgcaggcgcaaactcccaaaccagaataaaagaattctctatgaaataatgggccaggaagcccaatcgcgtcacactgtaatagacagtggggggtggaatcaaaagggggaaaaaactcatttcatctcagttaatggcagggaaacgaaggcagagaaggactttctttggagcggagctggtacgacaaagagcagggtttcgccgtgtcatgcaccatttgccgttgcactagggctcttttcaggagctgtgaagccattattataatgtgaaaaaggtggaaagaaatactcccttctggacactggaagggcaaatgaggtgcaagccttttttttttctttcttttcttcttcttcttcttctttttttttttttttttttgtttttcctcccagcctctctcctttcccattatgcacaatgcgctgagaaaggattcccagtccccctggtaaaaagtctggaggatgccgaggagttcactgtgcccttagataataacagtttgtcttggctctgatcactcctttttgtgacttagctggctgggaagtagcaaaagtatcttccaagctcagcttctctctgcttgcattctttccaaatacgtgattccaaagcccatgcccaatccttgcactgaagcttttagcaggaaaggtgaacagaggcatctggatgcatcgcggccagtctgccccttgcccaattccctcccctctcctgcctacaggtcatccctgagaagtgtgcctgtggactgcgttctttggggtaggacatggaatgggaagatgaaaagaaagccttcctttttctgtcctcagccgtaagaaagaatggtttcttcacagtgccgattggtaaaaccaagttctttgtaaattatggaacccaagctggaacttggagagcattcttctaactgaagataaatatggttgccactgtctttataaaaaaaaaagaaaaagaaaaagaaagagagaaagagaaaaaactgcaaaaccgcaaactggcttgttcttatgtggttgatggggacagcaagattacatatatagccagcatttgattctcaggactggtaaagtgtgaagaacagcagtgacattctagtcttcaataaatcactataaaaatgtttatgaaccctgcaatttactgtcttttatatgcaaattgaaaggggcatcattgcaagtgtaaaggagacccgaggtggcctgaaggaagtgtaaaatgttgcagtaggttttggagattgtgtgatcttaaatgggatcatttccaaacgattttgcgtttatacctctgtgacagttcgattaatttattaatgagattgctgtaagttgcagggaagtagaggccagcttggagttaaagggtggctttgaatgaaatacattttcatttcactgaaagaagagggaaactggtgattccaaatccagatccaaaaagttattttggcaaaatgaaatcagaacgtggccccttccatgaaagtcagctcaggcgtagaatgttcttttttttaattttttttttaacgaaactcacatcttctttaaataaaatctccatttagaaatttttgaagacttgtggatagaagaagtaaccttgaaaagggcagagctgagccagaccccttttcagctgggtgctccctggaagatggatcttgccttgtggatgtttttctaccgtgacagaagatagaaaggatgaaatagaaagagtgtgagtgaattctgcacccacccccgccccccagcttccccacctgtaaaatgatttgctcaaagtttgcaaagaatggaggcatattcaaagtgctcagcactgggccggacccatgggtatgcattcataatgatcagcttcattctctccctttccctctctctccacacctttccattcctcctaactaatgtgggagagaagagaaaattacagtgagagatggtggtcagtttacaacagtatttagatgagaattaagattatgtccattcagggagactctagtgtgctctacatccccccaaaatgtggggacaatatggcaaatatggccaggtacagtgacagaaagtaaacagcccatgaaaacaggttgctctgcaattctcccaactgttcccttcccgcttcccacctgcctcgtatggaaaacacccaaagtaggcactgtttatagagccatcgcttgcagaacatctccccggcctccgacacatgtgccataaatgctgcagagctgcgtccacagtccctgctccggagaagagcattttgcttgttttcaaacacaagcatcctctcccgcgcctgggagggcgaggtgcggatcttttcgccttggcagtccctcgctcaaatgtgcgtctctggcaagtcctgtctgctgatagttgatagtgctgccacagagcggctgtcagattccaaaggcatcataccatctgcttttccaatcttctgctcttcaatgtagacatatgttcgagtggttcgtgtgtgtgcctggtgaggggggtgctattttccgggggaagaggaggaggagaggatgcttaactccaagagtcctcaaagcaaactgaaataaaattttaagtgatgccaaaataagcagtcccagcaagacatgttataatataaggtcctttccttaaaaccatacctatatcagctttggaaataacgtacctcttaactgcatggaaaatctagaagattcgtggcttgggtctgtttctattcttaccacggtgacacgcaaaagaattttttaaaaaataggtttgttgttatttctgtatatctgtatgggcctgacctcccttttctctgggctttctactccagatttttattttatttttacactttcattgccctttgctctttctggctttcacctaaacaatagcatgtatatacaacagtacctataaaattgacgctcgtgtcactgatcatgccaagaaacctaatgtatggtgaatttgcactagtatttatttcctccctccctgtctctcccctctcctcccctcccttcctttccctcctacccctctttctttgtattattcccctagaaggaaatattcaagctggctttagagaggatagcaattgtaaggtcaaccaagtatgggatggggaccggaatagattttctctgcagatttcacgctgccttcccgggaatttctgaatgttttgcagcctaatgtttagcttccaacattctttcttttttttttagacagagtttcacccttattgcctaggctggagtacaatggcgcgatctcagctcacagcaatctctgcctcctgggttcaagcgattctcctgcctcagcctcccgagtagctgggattacaggcatgcgccaccatacctagctaattttgtgtttttagtaaagacagggtttctccctgttgttcagggtggtcttgaactcctgacctcaggtgatcccgcccgcctcggcctcccaaagtgctgggattacaggcatgagccatcgcgcccggcctagcctccaacattctttaagaaaactgcaccatgagtaaaatggggacgtttttctcttctgctgggacccaggacatgttggactgcacatcagttcattctctctgatctaaggtgttggctgctcttctcccttctccactgggctctgagcttcttgagtgaagggtctgtgggttttcacgctttgtactcgggcccagagcagagcctactgccttcacagaagatgctccacatgtgtttgtagaaggaacttggaagacagtcagttttaaagattttttcactgagggactaagagaaatagaaacagaggggattggccacacctgaagtcattctgtgttcaaatcttggctctaccacctatgatctgggagctgttagaggagttaatcgatgtagttaagactcaatttcttagtatatacaataggtgtaatagtaaaaattagatgactttgatgtgtgtaggtaagcggctagcacagtgctcagcatgcatgaaggactctttcattatcgttattaactgatgtttttaacttatacattgaaaggtggaaacaagcgttgcttctattgaatgacttcttgaaagtgccagtctgatccttgaccttcaggtgcatctctaaattctttcatgtcagggtctctgaaatctgaacacatctcaaagttcccttatgcctggcaggggcggtgtccgactttgttattgcctatgcatgtataaatgtcccaaatgccagcaaccaaacttgcaggatgggtgttgacagattccaggaaagtcccagatgtaacagcggaatattccaccttctaggaaccaaatggctgtgaagtggagagacaggcagagctagaaatattccggacgtggaaatcaaaagtaggtttgcgcaacacaactgcagagccagctcaagaacccagcgccagtggctgatgcttcttctttttttttttttttaatggattcttctaaggatggctgcatcagccaggggcagcgggtcatacctgtaatcccagcactttgggaggccaatgcaggcggatcatctgaggtcgggagttcgagaccagcctgaccaacatggagaaaccccgtctctactaaaaatacaaaattagccaggcgtagtggcacatgcctgtaatcccagctactcgagaggctgaggcaggagaatcgcttcaacccagaaggcggaagttgcggtgagccgagattgcaccattgcactccagcctgggcagcaggagcgaaactccttctcaagaaagaaggaatagctgcatcacttatgctcttgatggtacagaaaatgatctgcatggaggaaatctagacatcagcgattcagagtcaaaatgttattcaggggagagagacccttcatgtgaagaaattttaggaatactttaattattttttcacttacattttatagtatttattgtatgcaccagagtgattggtgataaaaatggaggcctacttaagtctaagagagttcttgtgaaagtgggagggggatgagggttggaaaattgcctgttaggtgccatgttcactattcagatgatggatacactaaaagtgcagacttcaccactacgccatatatgcgtgtaagaaattggcacttgtacccttgaaatacataaaactttataaaaaattaaaaagagttactgtaatgattataaaatgaaaattctacgtcatgagaaagcattgtgccatattttcaccgggagcatttttttttccttaggggaaatgaaaaataatggcatctatgatcttagatttagtaaaacgcagtatcttcttccccagctgaaatagcgaaagggtctcttcaggctcctgggataaaaaccaggatccttcatgtgtctgagcaggcttcccaccatttgactgctgctcctttgtccagacacatttaacaccatctccctgcaccccttcactgggctccgaagctgcgttcacacggcacgtcattggcagctcatctcagaaggttccagctttgcctggcaaattctcctccttcctttagatcccatctctggtagacagagtaatgagccccgaagatgtccaggccctactcctaattccatggaacctataaatatgggaggttacatggcagatggggaattaaggttgcagatggagttaaggttgctattcactcatcttcagattgaaagatcatcctggattatctgggtaggcccagtcgaatcagagatggggaaaagagaggcagatgggtcataatcagagaggtggctgagtaaagaggacttggcctgatgttaccagctttaaagagggaggaagcgtccaggagccaaggaattcaggcagcgtctagaagccagaagaggcaaggaaagagattctctcccagaacttccagaaaggcacgaagccctgctgacctttgattttagcacagtgatacccattgtggccttctgaccttcagaaaataaatttgttttaagccactaatttgggggtaatttgttacagcagccagaggaagctaaggcaccctataatataccctctaaaagcccctttcttgggaagttctccagccttccccattgactctcagaggaccctggacctctcttccatggcattgccatggtttgtcatgttgcacttatttgtgtgatgatttaattaatactcatctgccccactggacgtgggcaggaatagtgtgtggttcaactatgagattcctagggcctaccaccgcctggggtccaagaagagctcagcgagtatttgcagagtgagtgaatgcaggaaggagtcaataaatacattaattaattaatctgcaggagaaagaagggcaaggtactatgaactttaattaaacacatatcccacatccaggtgccagtcagggagctgcgatttaatttgctgctgaatgcacttttgaataaagggcctagaagatgcagtctcgaggaacggaggccggttagagacaggctggcagctttgcctcctctcccaagacaaaggcctccccgcccccctaaatccagcacacaatcagctgctctccctccccctattctcagcaggagagtcaggatgcatatttctttaagggatgctgttgagtttcttctggtggagcgaaggatttgtagcaaaacccagcatgtaactcgagtgttctgtgaagccagatattggtgccaagctaaatttgtgcgtgcagcttctgtttaaggcaattatatagtgtgtaatacccagtagagaaattaagtcgaagtacattttgcccatagagattatcctctcagttggatttattttaaacaagttttgccccttatacattaaggtgcatgcaataaatcacttatgtaataaactactctatattatgtgggaaaaaaaaaaggagctggtggcagggggagagatttcaaattgagctagacctcaggcatgaagggaggggagagagggggaaatgtggaggaagggggcgtttgtgcagtgggaagttggagaaagtacaaatgaaagcctctctgcagtgaacctcatgactgctttagagaggtgcttatgtaataactgcagtggtgtcgctttagaaaaagttacagagcttgtctttctagagcaacctcttggcttatcttaattaccagcagtccatagtgagactggagggaagaaaaaaagatgtaagcttttattaaatagaagaaaatcaggggcagaggacagagggtgtgattaggggtctggggtaaccacaaatctgggcaactggaatttattgtaatggtaaattacactaataataatctggggatgaaaacagggcaggcagtgaaacctgaatctcagctggacgatgaatgagttttaatgcaagtgtatcgacgtgctgtactcctaacacattatttgttatctgaaatttagatttccttgggtgtcctgcctttttttttttttttttttttttttttgagatggagtttcactcttcttgcccaggctggagtgcaatggcgtgatctcagctcactgcagcctccaccttccaagttcaagtgattctcctgcctcagcctcctgagtagctgggataacaggtgcacaccaccatgcccggctagtttttgtatttttagtagagacagggttttgacatgttgccaggctgctctcgaactcctgacctcaggtgatccacctgccttggcctcccaaagtgctgggattacaggtgtgagccaccgcacccggcccctgcctttttattttgctaaacctgatgacccttgccatagcagaactaaagtgatgatgatgattacagcagatcagttattttgagctctgactttgcatgaggccctttattaagtgcttcacttgtgtgatctgatttaatcttcacaagcaaactgggacagagggactgtgcctattcccatttcacagaggtgaaaactgacacttagttttcacccgggttctccctgtctataaggggaaaagacagggttcacaccaaggcctgtctggatccaaaacccatgctcataatcactaagttatactacctcttcgagatgctgatttggaaaataactccatgatgaaacatgtcaagggagactgcctgtactccgtaatgcagaaatgcattagagctcaaaaatctatgctgtttaggaaagaaaaatgatatcgctcagaaaatcatttaaaaacttcctggtgaatgcacccagctcgccaatgcatgccagccacagggcctcacagcacatttcaggagcaagacaattcagaccccactcttccccctgaaaaacctccttccagaaccctcttttgcagtgagcagagataagcctctccaatttacatgtttgtcattctctaactttgagagcccaataaaactaagtgcttagtgagaatcagacatggataagctgcttgtaatttatgatttaatgcagcatagtataaaaataggcaatgaaactgaaaggcaatcaaagtctattgtcacaaggaatgggaggaacggggacgtgatctaacatttgctgagatcctgctgtataccgggaacagaacatatatggtttcatttcatcctcccattatcaccgtgaggcctcttccgcttatctattgctgagtaacaaggtgtacccctcaatttactggcgtaaaacgacaacagttttattacatctcatgattttctgggtcaggactctggatagggtttggctggttgagtctcctcttgcagtggctgttgatggaggtcatttagtggaatccagttggcaggagagctggccttggagagtctaggatggcttttgtcacatgtccagggctttgtcaggttagcagggcagggagggctcagctggtctcagctcgtggctgctccagcaccgtggtctcagggtgattggattcttgtagggcagctgtttcagctacacagcagaagtggcacggccttttctgacttagtctcagaaggcagagggtgtcacttccactgcatctttggggaaggcagtcaccactgtatagtcctgagctcactgggattaaggggaagggacacagactccacctctcgatgagaggagaagcgaattgatgggcagattttatcactgtcctggggcctttgctctttgcccttccctttgccaagaaagttccctgtactctgcaatgctgagtacttctcatccttcaggtctactgcaagtgtcacttggccaacacaccatgccttcccagtctctggtgttactgtctgcatactgtagaccatcatcttgtttgcatacttgtctgttatctctttatcatccgtctacccacatcaggcaattccaagagagaagaccactggttttgtttgatctagtccctgttgagtccctgtgcaccttcagaaccacatctagcaatagaaggcgctgcacggggaattctggaatgaataaaaacgcttggcagtaccgcatggcgagccagtacccgtgaatgctacttcctccaaagagaattcctgggataacagagaatccattcatggctgccaggaggacttggatatttctcattttccattggccctggagtggaggaacagagccgaaaagtacgtggggggcaggcaaagctgcggtcagaggcagaccctgttggtgttggccgtgtcaaccagctttgctggtttctattatagccctggtgtggcaaaggacactgtgtgactgtgagctcaggtcagcattgcgatcccttcaggcctctggcttgcaggttcctgttcaaccctcttaaatatgcttttgaagcccgtacgttcggtccacgccaactcctgtttatactggtgcgaagtgatgcctgctcagattctgggcgtttcacgggaaggtattaaatgtgttttgaaaatacttgaaagtccagctgtgtatgctttattttatatttagccttaaattagagactccatatacctcaagtaataaaaaggcacagcaggcacttgggttttccctcagcttgctggggccgtgcacctatgtgagattttattatttgtaattttgggggggttaatttcacagcttaattctggcctttatgcatttagagctcccctcttgtgtttcagaaaggaggagttgttgttttcttttcacttgagtttaataaatgaaaaaggggaagggagagggaaggaagaggaaaaagcacaaatgtgcttgtttttggatcagcccctgtactgggcacatggatgcagtcagtcctcagtgtaccccaggaaagaggaaactgagtctccatgtggctttctgtctggcctttctcttttgcttgccttgtgctttgaatgcaggcctgatgtttgcctgtggacctcaggatttgtaaggccatctccacccacctacagctaagtttcccaagagccgatctccagccaaagtccaaggttccttgatgacccctgggaggagatgcaacacacagtttcctagaatcatttactccccaggctaagcacagtcacagaaatgaggtagctgtagccaaggatgatggcatagcacattcgtttcttaggcgtgccacgtactaggtggcttcagtcagcagaactgtattttcccacagttttggaggctcaaatttgcaagtcgaggtttcggcaaggccatcctctctctgaaaactctatgggggcgtcctctttgcctcttcccggcctgtaggtatttcctggcaacctttggtgtttggggcatgttgtcacctcattgccatctctgcctctgtcttctcaccaccatcttccttgtccatgtctctctatgtcttcaatgttcttcttataaggacaccagtccttggatttagagcccaccctaattcactgtaatcacatcttacctaagtccatctgcaaagaccctatttccaaataaggtcacattctgaggccctgggtggacatgcattttagggaccctttcaggccaccatatatggattccagagtgaccagtagaacatagctcaggccaagagagaaactcaaccttggtgaagttgcatgagaacagaaggcagccctggtccctgggagaaacccatccatactctggttacccactggccattcctggggacaggcggcaggtgtttagtcccctctctgcaaccatttgcggtcacctcttatgtgctaggcctggtgctcagcgctgagtgaacccatatcaacaaggcatggtcactgcgctagggaagtccctggtccagtggggtgagggtggcagtggctggcaacaaagacaatgagcgctgagattgaactacagaaagcagaagatggggtgacaagtttggcctgcggcaggaaagacttcccagtctttaaggataagtggcatttgatgagttgcacaaagaggagacctgtcctgggaatggaggagaagatgtgaagcgcgggaagtccagggacacacagccgtgcagagacccgggggcctcagcaggttagagtgtctgcatggcaccggcagaggatgaagacagggctggggaggggcatggggttagcctaacaagggcatcaggtgccaggttagagtttcggtttctaagctgtagataacaaaaatttcttgaatgcttttagcccctgatctgagttacgctttttttttttccttccattttccatccaacagacatttgtgaggcactgtatttgttttcaattgctgctgtaaccaatgattacaaatgtaccgtcttaaaaacctaaatgtattatctgacagtcccataaggcaggagtccaacacaggtctcactcggctaagatccaggtgtaggtggggctgggctttttctggaggccctagagggcagcttgtacccttgcgtcttccgtttcttagaggttgcccatcttcatggactcagggtccctttcctccatcttcaaagccaacagcacctggctgagtctttctcatgctggcatccttctggctctctcttcagattccctcttccgctttaaggacctttgtgatagttttgcacccactggatgacccagaatcatcttcctcttttaagatcagctgattagcaacgtcagttccacccacaatcttcatttccctttgtcgcgtaacctaacatattcacaggttctggtgagtgggatgggggtatctctaggggaccattatccagccttccacaggcactttgtcacaggccaggcgctatgccaagcagagaggtcacaatagcaaatgacacagacaagatccttgcacttccaaaacttatgttccagtgagggtgaagggcgttgaagaagtcaacgagaaagtcaagtttttacagtaagtgtaagttgtgtgggtgaaataaaaaaggttctttgctggagaataacaaagggagggacttacataaatagagtaatcaggggagggcccctgagaaactctaaaacatgaggaaagggctcatgatgtgaagaactggaaaggtgttccaggcaaaaggaatggcaaacacagtggccctgagacactcagagaaatcactcaggctgccttcgaaaggatgtattggagaagatgaggccaggggattgttagtaactgttgcaaggatccgggagaaagatgatgaaggccttgtagggcaagctggataagagcacccaaaatatccataaccgaatccccactacataggcatgctactttatatggcaaaagggaatttgcagaagctaagcactttaaaattattatctccttaaacctcactgcagagttataaggaaagcactgttatcagatgaagaagtagatttcatcaagtgactcacccggtatcatatagctgcttagcggcaaaaccaggatgtgaatggagagctctttctcggataccaaagctatttaatatttatcattgactaataatggtagagaaagtaatcatcataacctctgccctttattagtcactcatggtgtcacaagccctttacaaagcactgtgcatgcaaatgattcctcataacaaccttgggaggtagttactttcattgtgttagctatctcttgctgtgtaagaaattaccacaaatttagtatatttgttatctcatagctccataggttaaaagtcctggttcaggctgggacttctgctcagggtctcatgaggctgaaatcaaagcgtcagccagggatggggtcttatcagaggcccttggttattaacagaattcattttcttgtaactgtaggactgaggtgcttgttttcttgctggctgttgactgagggccccttgcagcccctagaggctattctcaggctctcaggccctatccacagatgacctcacaacatgactgttggcttcttcaagactgaaggaggctcccccatgctctgagtcactctcttcagtgagggcccagccccttttaagggcctagcgattagatcagtcccacttaggattgaatcccttttgattaatgcaaaaccaactgcgttcaggcctccatgacatctgcgaaattcctccccctttgcttggtagcctaactcactcaggggggcaaattatcccatcatattcacagttgccgcccacactcaagagaggggattctataggaaatggaagtcttgggggccatcttgaatcctgactaccatagtctgtgaaatccccatttcacagatgttgaaactgagacttagaagcattatgcaccatgccaaaggccatggaaggacagagcttgggcatgctcccgacaccaggtcatactgatgtcactctccctactcccttcactccctccagcacctggccttcacctgaaggtgctgaccttgctgtttgttggtttcagcaaacaaagggagatcacagcacctgtcccaggccttgtcttccagccccacaaacgtgcacctgcagccggagaccagggggccccgatcaggtggcagggcctttaattggagccacgtgtgtataatgagcagcgcacacacacaaaggcgagctaaaaatgtctccacccttctaaatatgggatgccttggccaggtattgagtcagctctgtgacgccagtgcaattatcccgattcagcatcagatttattcaccattaaacatgttctaacttgattgcaaacaagccttgtattatttagagggatccacggagctggcagagggggcagaggtgtccgcaggcctcctgcccttccaggcttaatggatgatcatcttccctgctaaaaaggcccattcactaggtgagtgatgtggaactgtttaatgaaagcaggaagatgatgtgaatgccagttcacttgagtgttacaaacggtttgggcactatagccttaaagtttctcctgctctttgcagatgaatgaaggggcgctttctggaatctttgtggctggggctgctgctctgcactgctgtggctctttttcacaaatgcttatggagctctaactgggggcaaggaactgtgctacggttgggaagagaggagtgggcaaaaggagacactggggcttctgtgactttagaggcccatcatcaaattttcttttttttttttagatggactttcgctgtgtcacctaggctggagtgtagtggtgcgatctcggctcacagtaacctctgcctcctgggttcaagcgattctcctgcctcagcccataggcacatgccaccacacctgactaatgtttgtatttttggtaaagacaaggtttccccatgttggccagccttgtcttgaactcctgacctcaggtgatccacccacctcagcttcccaaagtgctgggattacaggtgtgagccaccgctcctggcacccatcaaattttcaaaggaagaaatggaatggtgcaaccatggtacatgggaaggaggagggggacacacaagactgtacctatcatgggggcttcgacctcatctgggaaggtggttggagagagtgagtcctgacctgagctttggaacttatcaagttgagagagaaatttgataatttgtctattaacgtgtgaccttgggcaagtcattgaccttctctgaacctcagtatcctaggacttcagaagcgaaaggaagaataatgggtcttgagtatgcctagaattgagcaagctgctatgcttgcaaaggccttggccagctgctcacccaccatgtccctctgttcccactccaccttactcatgcctagacttcttgctttttaaaaataatccacccatgaaacaagtgtttatttacaaggctggcttccccaggaggctttcacaaatgcttaccgagcatctgctgtgtgccagacaagagtgaggagctggggactcagagaggagcagacgagggagacactcacattagagagtggcgtgtgctgagggaaggtgcctcaggcgacagatgggaccagggcctttaactcagtggcagcttcagagacagatctggaaccccaggactcaaaggacctatgtttgctaatcaagtgaacacggaggacctgccactgggcagggcatccctgaccaatccacaggtgatggcgggacagctccaggccctggggatcccccagggaataagccagattaaagcccctgccctgtgaggtgtggcaaagaaacagacaattcatgaaataaatatatgataaataacatatgagaaggcagggagtggtatgaaacaaatcagggaaggaggagacggagaagttggagaagacagtggattgtttctctgggtggtcaaggaaggcttccaggcagaggaggtttggccatgggtaccaaggggtagagatgggaaccttccagggacatggacccgatgctgccagcagaggggaaaccatggccctaagggcagagcacactggggcgggggtgggggttcagtgacagtctggtggcctgtgtggtgaggagtgcgggagatgggaacagagagcgagagggcagacggggtcatgttgtgtgggacctcggaggtcctgccatggctttggtttctacttggagagaaatagggaggtttgggcaggctctgagtagaggagtagcacgatctggcttacgatgatttctaacatctcaccatctttacttctgtatataaatatatgataagtatacctttatatatgtgacatgtatctttacatatgatatgtatggttacatatctactcactcacacatccacacacacacacacacacacacacacacacacacacacttttttggaaccattgaaaagttgcagacatcatcacggctcaccctgaaattccttagcaggcatcttctgagaataaggacattcttctatgcaaccatttcacatccacactaagaaaattaacactattacgtagtattatctaatatgccctctacattcaaattttcatgtctccaatcctgccccctttggaacttctgttggtgttcgatctggaatctgagaattcccttgcatttggttttcatcccccatagtcttcctttttttattttttattttatttatttatttatttatttatttatttatttatttatttattttttgagacagggtcttaatctgtcccccaggctggagtgcagtgacatggtgatggctcaccacagcctcagcctccctgggctcagtcgatcctcccacttcagcctcccaagtaactgggactactgtgatgtgccaccatagccagctattttttttgcattttttagagatgagtttttgccgtgttgccgaggctggtctcaaactcctgggctcaagctattcacctgctttggcctcccaaagtgctgggattacaggcatgagccaccatgcccggcccccttttttaaaaaacaaaaaaacaaaaaactcttttgtgttttagaaatggggtctcactatgttcttcaggctagtcttgaactcatggcctccagtgatcctcccgcctcagcctcctgagtcactggaatttcaggcatgagccactgtgcctggcctctgtcaacttccttatctagaactatctttttcctctattgttttgtccctcacttctgaatagttcagggatccctctggctactgtgttgagaataaagtgtcaaagccaacagtggaagcgtggacactgggtaggaggcttttgcagtgctctcggcccgcgctgtccaatagaactttctgcagtgatggatgtcttctatctctgccctgtccagtataaaagccacaagccacatctggctgtgtggcacttggcatgcaactagtatgacatcttaatttttctttttgagatggagcctcgctctgtcacctaggctagagtgcagtggtgcaatctcgactcactgcaacctacacttcctggattcaagtaattctcctacctcagcctcccgagtagctgagattacaggtgtctgccaccacgcccagctaatttttgcatttttagtagagatggggtttcaccacattggccaggctggtctcgaactcctgacctcaaaagtgatttgcccaccttagcctcctaaagtactgggattacagacaagagccactgcgcagacggacatatgaatttttaatttgatatcattgtgatcaatttgaagatccacatatggctgagggctactctaatgagtggtgcagctccaaggcagagagatggctgtgattaaccaatgaatgagggaacaaatatccaggcagaatgaatagtctatggaaagggctggaagttccacaaagcaggacgtatacgtgcccttttttcctcccctggtggccagccagcccctgaaacacagcaggtattcggtgcagccttctgttttcttccagatcctttgactcctgccccaccaacatggcccgtggcagactgggctgctgtttgtaagcctggctgaagaaaggcatcacaaagaaaatgccaccagcaggctgggtgtggtggctcatgcctgtattcccagccctttgggaggccgaggcgggtggatcgcctgaggtcaggaagaacctgggagattggaggttgcagtgagctgagatcgtgccactgcatgtcagcctgagcaacagagcaagactccgtttcacaaaaaaaggaaatgctaccagtgagcaggaagttggtggtcctccagaattgccctgttgagggtatctccctgccctggtctgaaagctgccacttgccgcccaccgcacagccccagggctttagctcactgtgcaggaagaggccttcctctgtgcatcctcccacagggtcgagagtgaatgccttgcctttaaaaataaaatgcatacgcctgtcctcatgcgctctgatctgccagcaggctgtgctggggagtggtgagtagtacagggatgtgtctgaccccaggagaactgccccgatccctatcttgtctctgctcagttctggtaactcttttatcttccctggagttatttttttcccttctttgtttctctttttctgtgtgctcttctaagagtaaaacgcatgtccccccatgaagtcactcaaagctcaggcgtgtgcaacagggacagcaaaagcacacacaatgatggccagagacactgctcagtgtactgtcttccaccgggacagcccactcaccaagggttaggtcctgtgctgcctgggtcccgggtctcctcggaggtcggtttgcatcacgtggatacactaatctacccaagttgacttggagaaccaatctgaaatcagatgggagctcccggaagcaaagcaattgcaggttcatttgttacttttattgtctcatttcttcttatttttttagcccaattgcctcctacatggggaaggttggggtcctctttattctacttttcattctcgctctgccgccctcccaggtgtttgtaatcacatatttttcatttggtttccgggtccagcgacaagaacaccagaaacacctcctccccagagaggaagagaggatgctccgccgcctgtaaggattttttgctctcctccttttgtcagttggcatgcgatatgcttctcaggcagtaatttagagactgtcaattcctgagagccgctggggaactgagcaatcgtctgcatttcgtcgctttagcccgagctgggtctttgagctggcagagaccaagatctttttctgggaagggatggtcctatttaaggaaggccctggattttgtcaagtttgaaaggttttcaacatcttcccgagatggtggtcatgggagtagtggttagggtggttatgacgcatgggacgggagaataccatgcccacccggtgatttataccaaaagatgctttcctggggtggttctgctggcagtcgggcagtgacatgttattaatgttttcctgttttctattgtccccgaatggaaaaacactgtggaacctttaaattttctcaagctgtctatgttttcctggatcgtccctcaattttccgtggtatgaaaaatgtaaatgttgctacattcagttcagggaaatccagccgttgctccagatccttctaagatttttcaattccagagatgttttcacctggaagattccccagatttggcaaaaacaacccaactcctagccactgctttttgagcagctactcagtgcctaagactttgaatagtttattaatcatgtgtcactgcagcaaaggggacatttcggccctgatttcagagatgaaagaaccaaggcatagaaattgagtcactttctggagtgtacacaactagtaagtggattcgagttagttttgctctattccaaggctacttactatgctatttttggtttcctacttttgttcaacttatatttatctgattatctgattctcttttacaagcacttagtgagcatcagctgtttcaatgagcatttatttactgatacctgtggtggcacccaggaaggactaggaatgctctgtgatatgtaggagaaggatgtatccactgggcaaaggtacctgcgagggatcaaagatggaaaggcagaaatccaaggactacgtgtgacatgaaaggggcctttctcctgctgtcatcctgaacctctgtctttcaaatttggatgtgtcgggggccacaggacactactgtgcatttgcctgtgatttgccattgggttggagtacttctcctgagtttctgcagtgttctaggtatggtcttaggccctggaataagacagtgtaggaaacacagaaggtgcctgatttcctgggcctagctaaggggaaaaagcgagacaatggggtcagaggaagctcagctgaacagatgaagttgagatgaacagaattccagtgccaccatgatttccagccgtgtgaccttccacatgctttttgatttttcttgaactcacttttcctttgtttgcaaaatagtaacaatattttccttccaagtgatggtgaggatttaagagttaacctgagtgtctgctgcatagtaggtgctcaataaactataacgtctttatttcttttccttccaatgagaagtcacttcctggagggaagccacctccaggaacagtcctggttcaactcatgaggagggtcactggttgggttccatattcatatctgcaaccagagttggaagcacaccactgtgggattagtcatgtccctagtccctgtctccgtatattttctccttctcttattagtttatcttttccaaaatgggctgtttcgtctctgatcctgatttatttttattttaattaaataatttatttttctgagacagactgtcgctctgtcgccaaggtggagtgcagcggtgtgatcttggctcactgcaacccccgcctcccgggttcatgtgattgtcctgcctcagactcccgagtagctggtactaaggcatgtgccaccactcacagctaattttagtatttttagtagagacaggatttcgccatgttggccaggatgatcttgatttcttgacctcgtgatctgcccgcctcagcctcccagagcgctgggattacagacgtaagtcaccacgcctggcctgatcctgacttagttacggttacctctctttgtatctctatatgttctcaaattccaacctgtctttgtaatcctctatttaagctatcgattacctccaaaaggccctgaatgtttcagaaagaaaggatctactggcagcttctgaaggcttctgtaataccttgtaccccaatgagtacaatgaaatcattaggggttctttcctctcctttggaatgaaactgctgcttaacttttctcccactgatgagatgcggtgatgctgtcacagttgggtggttgctcctcctgcagtcttcttcccattgcatgttcactctcttccccacttgcccacgagcagcaactcctgtttcttgtttttttccttttctttttcttttcttttgagacagagtctcgctccgtcgcctgggctagagtgcagtggtgcaatctcagctcactgcaacctctgcctcctgggttcaagcgattctcatgcctcagactcctgagtagctggtattataggcgcacgccaccatgcccacctaatttttgtgtttttagtagagatggggttttgccatgttgctcaggctggtctcaaactcctgacatcaggtgatccacctgcatcggcttcccaaagtgctgggattacatgcatgagccatcgcgcctggctaggaactcctgtttctgtttttatcctcttcccaagtctgcaggccccgcctggcccacccagtccttcttagaagatgatgacctcaactactgctttttaaagaagactgacgtcgtgttaactgagtttcgataacgcccctctgtgtattttctcatcgtcttattatgttttccaaaataggacctggggtcgaactcctgacctcaggtgatccgaccacctcgacctcgagaagtgctggcattatggatgtgagccactgcccctgccctagatggtatcaccttcaaagcttaattaggaagaataatatgagcactgagtgtaactccaggtcgggtatattatgtccctctgtgttctctagctagttatctatccatccatctcttgccttgtccacagaagttacaggtaggctgccgggcgcagtggctcacgcctgtaatcacagcactttgggaggccaaggcgggcggatcacgaggtcagaagttggagaccatcctggctaacacagtgaaaccccatatctcctaaaaatacaaaaaattagccaggcatggtggtgggcacctgtagtcccagctactcgggaggctgaagcaggagaatagcgtgaacccgggaggcggagcttgcagtgaaccgtgatcgcttcactgcactccagcctgggcaacagagcgagaatccatctcaaaaaaaaaaaaaaaaaaaaaaaaaaaaaaaaagaaagaaagaaattacaggtaggctagagcacggatgagcaaactgtttttataaaggaccagagagtatatatttcaggctttgcaggccctatgacgtctgtcacaattcacttctgcctttctactgcaaaaacagccatggacaattcataaattaatgtgcatggccgtgttctgataaaagtttatttatagacactgaaatttgaattccatatgtcatgaaattatatttttttgattttttttttcataaaaccagtctaaaaaagccatgggttattttgtcatggcacgttttgatatgaatatttccacccccattatttgcataacaaattacagattatccagaacaggtgggctgtacataaacaggctggtgggctggatttgtcctgtggactgtagtttgctgacatccaggctagatccttaatatacaatgaagtagtaaaacacatgtaaaagtaaaaagcaggcgaaatagaataaaatacacatttgcacaccacagtatccaaaaaggttatgtactggggctaaagatttggcttggagtttcctggtagtcaaggcaaaaaagggaaacaaaactagttacagagtttctcggacctatgagcaaaaggatttccatttctaatcggaggcagaggtatcatggccttcaagaatcttccggttaaacacggtactgaaatttgattttattgtctatcgttgagtccctagttattttgcctttaccaaggctagttgcagagtatttgttctagtatgtaaaatcagcaatcagccattttctggtcattgtaatggtgtaaattatatctgacagttgttaattaaatacctactcatgctttggagccaaagccaaatagtgctctgtaaacattatgatttgtcagtaatcaatgtgatttgtataatttgtgagcaatcagatactttatccaaaagcggattattgacctctgtgcccatcttgggagaaattgccacttggtctgtgtctacacagacccaagaggagaagggatttgacaatggtctgattaattgaatcagtggtttgggggagtgggctgtctgtattgatccaattaaatagataattgtcagaatcgaggtcatgtctataagacaccaccatttcaaagccaaagagattgtttcaaacatatcatgctcaccccaatcaatgtgggccgcctcctccacatgaaatcaaccagaaagtgattgattctgcagagccataaaccagggtctttcctattttcggcaagtggttctgtgctaaatacagtgctttgaaatttttgttccccatagacccaaggatgatgattcattatgcaaataatggggatagaaatatacaaattgaatgttagggctgggcgtggtggctcacccatgtaatcccaacactttgggaggataaggtgggcggatcgcttgagctcaggagttggagacaagcctgggcaacatggcaaaaccccatctctacaaaaaattttaaaaatttagccgggcaggcatggtggctcatgcctgtagtttcagctattccggaagctgaggtaaggaggatcgcttgaacctaggaggcagaggttgctgtgaggcaagatcacaccactgccttctagcctgggcagcagagtgcgaccttgtctcaaaaaaaaaaaaaaaaaaaaaaaaaaaagaaaaaaaaaagttggaatgacatcagactcaaaatgtgtcacttagcagtggggatgcaattctgagaaatgcatggttaggtggtttcatcattgtggaacatcatggagtgcacgtacacaaacctagatggtgccgtctactacacacacacttaggctgtatggtctagcctcttggtcttagcctacaaagctatgcaacgtgtgattgggctgcgtactgtaggcagttgtaacagtggtatgtgtatatctcaacatatctaaacatagaaatagtacagtaaaaatatgatattataatctttgggacagccatcatatatgcagtctgtcattgactgaaagttgtcatgtagcccatgactatcgtctcttttaggggaaaaaacaaaagcagaaagcaagcaagctggtatcctgcgtatctgtgagctcaggaagcagctgcatgtgcatactggataagcaagggagactccaaccccgggctctctaagggtgtaattgttgcaggcacactgaggggcagacctctgggtcttggttagtggtccagagagggaagagagcaaaggtagaaggcttgagtttaatttctgcatcagactcaaaacccagctaatcttttctagctggtcatttcaacctagctggtgatttcaggctagttaagcaacccctcggatcctcaatgttcttttccctctaatgggggtaaatatacttaattcactgggtgactgcatccataccaagcacacagccgtgatcagttagcctctcacttctctactaatccccactgtggggaagagctcatcattaacatgccttatctgacatgtggcaataacttctgcctttcttatgtcatctgcatggttgcagtggatagtcactggacaattgatgaacaactactacatgctagatctctccctggggagagtgcttgtctttgaaacagtcaaaggaggaaggaagaaaagagaggcagaacaattataataaagcaacttaacccattgagagacataaggatgctgcaaggcgcagtgctggatggagaggacagtgcctggggcagtcatggaagacttcttagggaggtgactttttaaggggttttgtgatcaaaactatggagtcttaagtccaaccagtggttatgaattccggctctgccacttgctataatagctgtatcaccatgagcgataacttaacctctttgtggctcagtttcttcatatataaaatggggatcatgatagtctctgtcccaggggagttaggaggattaaatgcaacagtaatccaaccacagtatgaaaagacaggctagcacatacaacacaatctataaatgtttgctattattgtcatcctttttattagtatatcatggtacaagtttgctgggtagaaagatggcgatggggaaggggacatttcaggccaatgtgataataaaatcaacagacaaaagaagggagagtgtggtgagtaggataaagctctgtacagatgcaaggggaagggtgttgatgtcaacacgcatgcagcttcccacacgtcgtgtggattcttttctgtgctctccattacggaatctccctgaaaataagtggtcactttgaggtttgatggtttaattctaccacaaaagtataaaaagcaggcagcctgctgtttatagatttttttttaagtgagggagtatgttaatgagcttagattgtcagggagctaaggggattcttgacatcaaattgtgggtagctaaataggtcaccccaagttattcagcatgggtggaagaccaagaggatacacaagcttcaaaaagttttcagggagagcaagagatgttcatttacctcattcaaaatggaatctttaatgctagtccagtgcttggccagtacaaggccattatatatttgttgaatgaatgaattcgtgaatatgtttataaagacaaggaaacgccattctgcaaatctacatgcagtaaaatagtttttcagtcactttgccttcatttgtttgacattcttggaatatttgggctctacaaggtgctagggtaaggcacgcaggatgcaagattagcgagatattgtctctactctcaagaaactcgctttctttgggaatcatcacctgtttttgtgtcacggaccccttgggcatttggtgccctttgcagaataatggttttgaatacataaaacgcacgggatcacagaggaaaccaatcatattaaaatacagttgtcaaaatattaactcatgggatctagtaacaaatgttcttccttcttaacccattaaagaacacagctcatggtcggtccattaactactaattatcaaaacagtgggtgaaaacgatgtttggaaatagctgcgactctcgcgtgataggaaaatatctgtgatttcgattgcgacaaacacacagatgcttctcacacgatcgcagtgcattgcctaaatgacagtaatgctaaactccagtcagatgttagtgaaaaataaagatgtaacattttggccatctgtgtacaccccctctttctagggttccagccacagaccctcagattaaggagtctgcactagcttgtagcttgttcaatcacacatacacacaaaaagtgccagttataaaggagcaggaggttttctggagccaggatgagctgggaccaacaccagcaactgtatcacccagttcactgagagttaaaatcacccatgtgacgttctctctgcaggcacatagtaagtgctggataaatgatagggattgatattgaccagctttgacacatgaataggagagggttaggcaaagacaaagagagatggggatgccaagtaccctctgggcagaggaaaccatgagtgcagaggcacgtaggcctgaaacaggccagaaagcaccaagcaatttgcttttgctggtgaaggaggtataaaaggtagagttgcaaagactggggatggagctttaggctgggatcagcgcccaatgggctgggatgacaagtgcttggggcacattggcagctgcgaaaagctcgctctgatgcctgtgtggggacagattttgggggcaagaggactctccagcaatctgtggcaaaaaaaaaaaaaaaaaaaaaagtcccgcttgttatcaagcctactggcttatctgttatttcttggacatgccccagtcgctagtaaataaagctgtctactttacattttgtctctgtgcccttttacagccttttctcggaggagctgagtcccattatattccgaaagcatatgttcccgatgattgctcattctctttccaataatatctttgcaggacaaagaggaatggggaagggaacatacttttaggatgtcagtcccagttttaattacaagtgttcctggttgtggcattcatgtaattgggggctgatttatgccaaatgatatgcactgatgtaaggggctggagcccaagagggaggggaggccaagaagaggcagtggccccccaccaagcccggaactgaggtggcacatgtcagcggctttgctcagaagcacccagggatgatggaaaaggcaaccgaaagggctcagcttctgcagatagagtctgtgctttgcactttctggctttgtgacctttctgcaggttacttctctcccctgagcatcagtttactcagctgaaaaatgcatctgctaataatacctatggcatagggtttggggaggattaaataagataatgtaaatagagtttagcgtggtactgtgtatatagccagcactcactgctgttggcttattgaaaaaacaaaaataatacctacaataaccacaatatagcaacagcaatcatgttcaagtctgtatttggtttaaggagggggaatgtgacccgggggctctgtcattagatatatgcacacacttgacctaatggaaagcttgaaagcaattggatgggaaaacagtccatcttgttggaaggctgtcaagctgtgtaataaaagaattactgttctccctttgcatttatgcattgcatgtctctgttgaattcagagtgctttatagacctctgatcagcttccagcatcctcttggtatgagttctagggggagatgaggaatgtgcctaattcccttgagtgatttacttggtgttaccctggagttgtgaggacaaaaggatggggctgactgagactggggatgttcatcacaaagtgttcaggttacatccaggctgattactggccaggagactaggcattcatagtggggcgtcctttaaggtctgaagaggacagtgaccatccaccacaggcaaacatgtgtgtgttaaaaaggaatgacgttttggtctgtgctacaactgggatgaacctcaaacattacgctggacgtggtggcttacacctgtaatcccagcactttgggaggctgaggcaggtagatcacctgaggtctcagaagttcgagaccagcctggctggtggtgataccccatctctactaaaatatggtgataccccatctctactaaaaatacaaaaaaaaaaaaaattagccagacatggtggtgcaggcctgtaatcccagctactcgggaggctgaggcaggagaatcacttaaagtcaggaggcagaggttgcagtgagacaagattgtgccactgcactccagcctggatgacagcaagactccatctcaaaaaacaaacaaaaaaaacattatattaagtgaaagaaaccagatgcaaaagatgacctaacatgtgaatctgtgtatacaaagtacctagaataggcacctccaaagagacagaaagcaagctagtgattgcagggggctgggaaagaggggactagagaatgactgctaaagcattcaaggtttcttttggggttggttaaatggtctagaattagatcgtgttgatggttgtacaaccttgtaaatatactaaaaaccactgaactgtacactttaagtgggtgaattttattttatgtcttatttatttattcttttagggacagggccttacgctgctgcgtaggttgtggtgcagtggcacagtcacagctcactgcagcctcaaactcctaaggtgaagagaccctcccaccttagcctcctcagtagctgagactacaggtgcgtgctaccgtgcccagctgatttttaaatttttttttctttgttttgagacggagttttgctctgttgcccaggctggagtgcagtggtgctatctcagctcactgcaagctccgcctcccaggttcacgccattctcctgcctcagcctcccgagtagctgggactacaggcacccaccaccatgcctggctaattttttgtatttttttagtagagacggggtttcaccatgttagccaggatggtcttcatctcctgacctcgtgatctgcccacctcggcctcccaaagtgctgggattacaggcatgagccaccatgcctggccctgatttttaaatttttcatggagacagggtctcaccttgttttccaagctgatctcaaaatcctggcctcaagcaatcctctcctctgcctcagaaagtgctgggattacaggcgtgagccaccacacctggccgctggaaatacatttctaaagaggaatgggagtcaggctggtgaagaaacacgtgagtgtgggatgaggatggggacacagagtgatgtgaggcctacacaacaggagttcaatcctaggacctgagctgatgtaaatgaagcaccgccaggcccagttggggaggaccttgtgttcctgctggagagtgagagtccctccctccccattccactcccaagagcagtgaagagtcaggaaggtgggcttgttttgttttgttttgttttgttttgcttgttgagcaagggaatgcggttcccctgtgtcggacttgtttcagaaagacaatgtcactgaggctggggcagggagattagctgagaggctcttgcagttatctgggaaggagctgtccataaaggcctgagttaagacagtagccctttgggttcgatttagtggtggctccccaaaagatatgttcactggaacctagacatttgagaaaaagggtctttgcagataagttcagttgaggatctcaaaacgaggtcatcttgggtggaccctaaatccaatgacaggtgttttcagcagagacagaagtgaagaaggcacagaagagaaggcggtgtgaaggtagagactgagatcggagtgattcccccacaagccagggagcactgagggctgctggcacccccagataccaggagaggggcacaaataggttctcctcagagcccccagaaggaactaagccttctcacacctagactttagacttctggcctccagaatactaagaaaataaatttctattgttttaagctaccacacagatgcaggaaactaatataccctttaatgattttctccatggcctttctgataatcctttcatccttcatctcccctgttgccgttttctttgctttgctttgcttgcttgctttttttttttgagacggagttttgctcttgtcgcctaggctggagtgcaacggcacaatcttggttcactgcagcctccgcctcctgggttcaagtgattctcctgcctcaccctcccgagtagctgggataataggtgcctatcaccacgccgagctaatgtttttggatttttagtagagatgggttttagccatgttgtgcaggctggtctcaaattcctggtcccaggcgatctgcctgtcttggcctcccaaaatgctgggattacaggcatgagtccccatgcccagcccctgttgcccttttcaaaacactaagtgcatcatgttaaccttccactcgcttctttaagtttcctcactccttttaggtgaacaacccaaaccctcatatgccctagaggcccttttcagccctgttgacacttcccttctctgtgctttagtcaccctaccctcggtcaactcctaactcctgcctgccacagggcctttgcacatcctctgccggggaggctctcccttcaccttcattaggttatcagatctcagctcacacatcacatcttctgagataccttccagactcccctggccacggtcacttcctttgctgtggactctctgggaactgtgtccccttccttctcacatcagcttgcagttctgtacttgttcatgtgatcattgatcagggtccattttctgctccagacaatgatctctatctagaaagaatcatgcctgcttttctgcactctcctgcctctaggggagagaacacagagcctggcatgtggtagactctttttttttttttttttttttgagatggagtctccctctgtcgcctaggctgcagtgcagtggcgcgatctcagctcactgcaacctccgcctcccgggttcacaccattttcctgcctcagcgtcccaagtagctgggagtacaggcgactgccaccacgcccggctaatttttttttttttttttggtatttttaatagagacggggtttcaccatgttagccaggatggtctcaatctcctgaccttgtgatctgcccacctcagcctcccaaagtgctgggattacaggtgtgagccaccacgcctgggcggcacgtggtagactcttaatgaatttttgctgaatactgagtaaataaagaaaagttaacacagtggagtccaggtacagtggctcatgcctgtaatcccagcactttgggaggtcaaggcaggaggatcacgtgagcccagcagttcaagaccagccttggcaacatggtgagaccccatctctacaaaaaataaaataattagctgggcatggtggtacatgcctgtagtcccagctactcaggaggctgaagtgggataatcagctgagctggggaggttgaggctgcagtgggctgtgatcatgccactgcacttcagcctgggtgacagagaaagactccatctcaaaaaaaaaaaaaaaggtagagatggtggagtggtgacatttggtagataatatagctctgcagaacttttcattgcaaaatgaaaattcttcattgttattataattacttcaaggagcaaggccattttgtgtaagctatcctgggcctccctgcctcccattttacaccctgtttattgatactaagaagagcctccaactgaataagaactaatgacttctgcctgccatcattttggaatgtccaattccccgttctggagagcctttgattataacatcagcctgtcatttggacctctgacctgaattatatgaatctgaaaaatctcttcctttcctatcgtgaattcggtcattgttataagccaagctttgcaaaggtggaacaccttggagatacttatctcctccttactctacccaagtaatgactcatccttttatacagaatgtctcttttttgatttagatgtctttttttgatatagatgtctcttgatatagaagcatttctcgggatggtttttgtggttgcctagtgtcttctaaagacccctgaacatagcatagaaacagcacgtgtcttaggcttggaatgagataatgtctcagtgtttgagtagaattagggagtttgctttattttcctttgtttttcttttttgttgttgtttgtttgtttttgagacggagtgtcgctctgtcgcctaggctggagtgcagtggtgcaatctcagctcactgccagctctgcctcctgggttcacgccattctcctgctctgcctcccgagtagctgagactacaggcacctgccacgacgcctggctaatttttgtattttcagcagagacggggtttcaccgtgttacccaggatggtctcgatctcctgacctcatgatccacctgccttggcctcccaaagtgctgggattacaggcgtgagccaccacgcccgactgctttattttcctttgtgttcctaatacctggcccagtgtctggcaaatggaaagttcccctggatgtagttgggtgacactatgagtgtatcgttaggcatgttcaaaatatagctaaattcagtccagacattctacctatgttttcacagaaacatgaggcagtgtacagcgcttatctgtggcatttgattaggacattttactgaagagttgataaaaaagcacaaattgtaggctgcaaatctatcatttttctttcctccttcttcctctccctccctcccatcctttcttgctttcttccctcctctctccttccttccctccctttccagcttaactaaaattttctgatacttttttcctgaattagggtatgttttggggggaaaaaacgcttcagtgcgtgtttctttcgacattacacataagcccccatggaaagcaaattgaataaatttactctctaaacttctttccacaagagtaggtttataatttattttctttacattatctggataattacatttggtttgcttacatagatggaggcgaatggttttccaatcttcaaaccaacctatatcacaaaagcattctgaaaactgggaagagatcacttcacagtttcctgaaccactagaaaaaaaaatgttcataaatttatagccgctgacattgaagttggagaaaagagcatatctagtacctatgctatgtggagaacactctccatgtctttgaaaaataagcacaatacaaattatatttgaggatgacctgccaaagggttgattatcctggaaacatgttttctcaatggtccatttgggcaaacaggccagctgaggtatctcaggatagcaacaggataagcagaatcgattgatgaaggagggagcctacctctggaggccccaggctgggactttgggtacagatgcacaggagacctttgccccaccccgtcacggctgggcctactcagttccacgtctttgagttttcacgcggaaactggatgtttcttacatcctcagctgcaggcatggggaagagacgcacatcagccattaagaaaaaggtatgcagtctacatgcctgttaatttcctccacatacacagtaaacccatcatgtccatcagcaccattgtcaaaacatgtgtgcaccagtaaagggttctgatgtgtgataaatttatttagctattactcatctgaagttatactattttaggatcttggggcagtgaggactttggaaatggaacaggatgctcctttaagttagggtaaaatgaagtctataaaaactgtttttctatatcctcctcctaccccacaaagaaagttagggtaatatattcttatataaaattgacatttttaactttaatgagaaattgcttgtcctttaaactttaggcattgatgcgcttaattatgcttttcaacaagattttgcatttttaatatttccttttagagcttccaggaatctcaattattaattgtaccctggatttattggtctttggactctcccgctagtataaagactgtagattcatcaaacattgtttactgtcttcaaacttcaacagtgttttaactatcaaatagaaaatcgaaaggaagcataaacgcatatggtcactttactggtataataggggccaagagccgttgtgttttataatttcttgatgatcctggtggtaggtaagccaaccgctatgaactctgatgagctctggtttaccccatagtccaaataaagaatggtttctgacattgtatgaccaaaaaaaatagcatctgcccaaaagatgctatttataaaactgttacaaatggagcttattgttcaccagaattttatgaataagtaatgaagtctaattttccgttatcatagccattggttaaaaatgcatgtctgttaggacattgtaattattttgtattacttaggaaaacttttatgattctactcttttaatttttttaataattactttatgacttcttcattagggtttctctcctccagtgcgtacgcagatcttctgaaaaggaatctgacaaatttagttgctgcatttttctaaattgctttcaagactacccagcacttcagatacttttcatggcccttttttcccaaagtgttctccaggatgccttttgatctgcacgggcaatcccattagcagtgatggcttaaggttcccacagaaactctgccacagaggcactgacaccagaccaggcgtgatccctaacagcttgctgtaccgactcatatgagggctgtcttggtccgtctcatttaaggtttggcttctccaaagattagacacccttgttttcgttcaacctttgtttggctttgaagcatcatgcacttgggtcttgaaatcttgggctcaccgctgcttgtaccagtatcttctaccctccggttgtttgtggccattatcaaacaaacaccatgccaactaggtgtaaatgcagactgatattctgaagaatccaggaagggctgggcatggtgcctcattcctgtaattctagcactttgggaggctgaggcaggaggatcgcttgagcccaggagcttaagaccagcttagggaacatagtgagacccctgtctctacaaaaagtaaaaaataaaataaattggctgggtatggtggcacatgcctgtagtcccacccactcgagaggctgtgatgggagaatcacccgaggctggggaggttgaggccgcagtgagccgagatcgagtcactgcactccagcctggacaacagagtgagaccctgtctcaaaaaaaaaaaaaaaaatccagtaggaaactatataaacactagggttgctttaaaatgtcaaggccaactcttatgatatgcggaagccttcgcccccttcttgagggtgtttagggattagatgagtgtcccatctgggtttcccatccctgcagagcccacgtgtggggtgctgagaggtacgtggtgggtgactccctggggagcactgtttggtactgatcactgtcccatcctggcactgcagtcctgggacagtctacacagctcctgcctccttcttttcttcaggattatctcgagttggtttgcaaagtgaaacgcattagacatcttcaagtgggctgaagaaagggactcaatttttgtgggtccatgttaatgtaattcttatgaatttgagataaagtggtcattaaagcctagaaggaagggaaaagctacacccccctgtggatgtgtatgctaaacttgattgatctgggcatatgtggaatttttacctttgttttgtctttatttatttttaaaattgaggtaaatttacttaatttaaaatttatcatttaataccatcttttttgaatggttaaatagtggatgtattttttctagtttttttgttttgcttaataggctctctctctgtctctttctttctatatatatatataatatatagaaagatatataatctatatatagatatctatataatatatataatctatatatgatatatatatcttattatatattatatatatagatagatatctatatacagatatctgtatacagatatctatatatatagatatctatatatatagatatctgtatacagatatctgtatatatatatagaaagagagggaactgaacgggatgctttttattttgggctgttattaggtagactctcctgggacattctacacagctcctgcctccttctgtatgtaatatatatattatatatatataaaatatatattatgtatagataatttatatataaatatgtgtatatatatatttgttagggtaaaacaaagtctataaaaactgttttcctttgtcattgcccccaccaaatatttatatatatgtatatacacatatgtatatatgtatgtatagagagtctattatatatattacatatacataatatatacataatatataatagactctataatgtagactctaatatgtagtctatatattatattataatgtatgtaatatataatatattctatgtaatatataatatattctatgtaatatatattaatatgtagggaatatgttacatattatgttgagagtgtatatattatatatgggtttctatatattataataaacccatatataatatacataatagactatacacatatacagctaatatatatacacaatagtctagtatatattatacatgtaatatactttccatacatacatatataatttggggggcaaaaacatatatataatgaatataattatataattcatataatatatgtaatagagcgtgtatattatttacatatgtatatatatatatatacacacacacacacacatttcaactttcttgaactcctgaaccagccttagattgcctagtaccagggttcttctttttttaaaaaatttatattttattttaagttcaggggtccatgtgcaggtttgttatataggtaaactggcgtgatgggggtttgttgtacagatgatttcatcacccaggtattaagcctagtgcccattagttatttttcctgctcttctccctcctgccaccctccaccctttggtaggccccagtgtcttttgttcccctctttgtgtctatgtgctctcatcatttagttcccacttataagtgagaacatatggtatttgcattttctgttattgaattaatttgctaaggataatggcctccagctccatccatgttcctgcaaaggacatgatctcattattttttaaggctgcatagtattccacggtgtagatgtaatatatatataatatatatataaaatatatattatgtatagataatttatatataaatatgtgtatatatatatttgttagggtaaaacaaagtctataaaaactgttttcctttgttattgcccccaccaaatatttatatatatatacacacatatgtatatatgtatgtatagagagtctattatatatattacatatacataatatatacataatatataatagactctataatatagactctaataattattttttaaggctgcatagtattccatggtgtagatgtaccacattttctttatccagaataaactattttttatactggttttaggctcacagcaaaatcgagtggaaggtacagggattttccagatttcccctggccctcactaccacatgcgtagccacccctttatcaacatcatgttaactattttaaagtggacagttgagtggctttaagggcattcatattgttgtgctaacatcatgaccatccatctccagaatgattttcatcgtgcaaaactgaaacgctgtacccacagaacactggctcctcatcacctccccaagcccagcccctggcaaccaccattctcccctactttgtctatgaattcgactactcttggtacctcatataagtggaatcacacagtgtgtgatgtgttcttttgtggctgacttatttatgatactggattctcagcatcatgggagttaggactgtctgtcgcaccatcaaacaggcatagctggctggctagaccatgtcacagggatgttggaactgggtggcactgactggcccagccaaggggtcacgcaggggactcctgattcattcctggggaaagtagttatgtcaggaagcacaggctatggctcacggctgtggctgtgcccacgtggtctgtgtgggctggtggtaatgggccagggaactgaatgggatgccttttattatgcactcttgacattttttatattaatctgttttcttctccatctataacatttcccacatgctacactgaagggatattttaagcattaattctcctaaaaagcctcatgcccaatgtaaaaatagttcactgtctcagaaaaaggcactctctataaatgaaaagcaccattattagtaatgtcaataactttcctgacatccatttgggcattgtatatgttttgataggattacataaataatgaaattgtatgcaaagcatcagaatgcaaaaggtgttttctccaaggtgtatacactgcctgggccttgtactctggccctcaattttcttaaacagctgcatcttttgggggctctgttaagacatgctactgtctttagtattttgccccctcaccgaatgatcaggagactggcttccccaatgccctgggcttaattcccagatatttattctgttgtggagtgattatctgttcctggattgtctcaaaggcattaatctttttggtatccaacatcttgaatgcttctgtgtcattttcctttctttttttttttcaaagcacttaattatttaaaaacaaaaatacttctctgatcagagcatacctgccgtgctcaaagcacttgcttacttggaatgccataaattacatgaaggaattattcattgtatcacgaaacataccttccagtctcccgagtagtgtattaggctaagtatggtcttttaaattattactttaaaaataaaagataatggaattatagcattaaatacattttgcaaatgatcttctagtaggattattgaaagacagtaaaggcaagtataaatcagaagcaaaatcattgtcctctaattcattaatggttaataatattgctgactcttttaacttgtcaacatttcctacattcaacattgtactctaatatccagtaaagtgaaacaaacaaacaaataaatacacttttttcaagaaaaaataaatatctgtgatctcatcatttgaccgtcagtattttcatttttgcatgtgccactttaatttccctaggcaacactagctagtggcccacaataagacgtagaaaacaagaccacgtaccttccagaatcattggccctggctctactcctggaaacccagtccatctctaatccctttgatttccaatgggaggcaaatccaggggagttctagactgtctagaatattgtaccaagaacaaaaggccaaccccattagacagtggccaagggaggtgaactaaagttggtgctgtgaacagggctaatggtttgtgatttacccataagtggaaggtgtactccggctgctcctttaatattttatgattagcagtagaggtgtgtctgggggaaagagtcagcttattttatttatttattaattttttgagatggagtctcactctatcatccaggctggagtgtggtaggtgggatcttggctcactgcaacctcgtctcccgggttcaagtgattctcctgcctcagcctcccaagtagctgggagtacaagtgtgcaccaccatgcctggctaatgtttgtatttttagtagggacggggtttcgccatgttggccaggctggtgtcaaactcctgatctcaggtgttccaagaacaaaaggccaaccccattagacggtggccaagttggtgctgtgaacagggatcctgcctctgcctcccaaagtgatgggattacaggcgtgagccactacacccagccaagaattcagcttcttaaaggagctgcctcagactgtctcaagatcttagaaggccatgcctacattgccaccagcatcccttggctttttgcttggcttaagaatctatcttttccgttcctccttccagcatactcagcacagtccacctctgtggtctctctgtggttttctttctgttttcctgctctctccatttctcattcaccacaccctgggctatctttcactctctatgaaataccttggatttaggaattggagatttccttgggtcaggtttcaccctcttcaagtagcgtctcaaacagtatacccactacagctttctccccactctgtcaaccatgccatggggcctactttttgccctgactcccaccagataatgcccatcagatggcacctcttttggctgaaaaatcgaaaactcatcactcttcctgcattcattagacagtaccctttatgttcaactttgtaatttaagtcccattcttgcctcatagaattattgcccgttgacctccatataagtatctgcatttgctgcatcattcatgacatgtgaggcctttgacaaaccctcctatggtgcagcttcctccgagcagctcctaaggaagtgccagagtcagggctttcctctgcctgaattatcggagctcttggcttaatgtgggagaagagatgaatgatctgtccttctatgaaaggcttaccaactccattcaattcacagtggctctctgaagctctgtttttggaaggactgtgaggctgtacctgcacttgattgaacgagtgctgggattgattagtgatgtctgcagtgagcgaaggattgggaagagtaaacaggcatgctgcatatctgtcatcatggctctgagtgtatcctgtttcagaagagatgaactgtgctgtagagatgttagcatcaggtattttagacacatgaagagaggatcagattcagtggaagtgccaaagggattctttcagatgggcaataagtggttctgaagatacgtatttctcagtgtgttatcttggctccatttagccacacaaaaggaatatgggtatagtgatgggtctctcatggctcacgtattaactgtatttgttgttactgcttctcaggcactctgttaagaatgcagggctcttcctcagactcagggcggggcctgggctttacagcaatggttttcagtttgtaatctctctcaaggaagggagaggagcacaaagctgccttgactgccagcaccatcagaaaagtgacagcagtcttggccctgtaattgccaacagtaattcatttgttcgttctctctctctcgctcctgctcctgactctgggggatgcttcttttcctaccctgcctggaaagtgctggggcatgggtgaaaccagaatggttttgattctcaagtctttttgtagagaggaagaatggatattcctagggtcagttgattgagggtgtgttgggggaatgtgattatcgatgatgctgtatgctgggtactagactgggggttcgttacatcaagttgtggggtctgtggaaaggaagttgtcataggagtctaggactcagcagctgtcaccttcccaaagtcacactgctgatgagtgacagagaccacatttaaatctgtgtgtttacaaggtctacaactgcaccctgctacctcccagaagctgaggcaggatgggcaggttgccacaccctcccaacctcctgcaaccttagttgttagtgaaaggttattaaataggcctcacaatcgcaagccaggtaaatatgtcattggagaggttggttttgtttgcatttctggtgaagttgagttgtttttatcccctacaaggtcatctagacatttttatccccaaggtcaggagatctttctgccagaggtcagcattccatccagctcctgcctgctctctgggtggccgactgtgccagtagaaatgccagctgcagccaaaggacaggctttccatccgagaaaagcactcacactcgcatttcttttctggttctgttcctcccctacataaccagaaaaagctcgttaacacatgatggcaaccaggctccaatatctgccagttcccctgtacagattcctctttagcattctctcggcttccctcctcaacaattaattcagatgagcagttgggagagtgcaggatccagttcaaaaggatctgtccccccgtgaaccccaggacagggtgagaggccacctgcacactttttttttgtcagctcacaccctgttggccctttgcaaatatttgtctttcctcatgcacgtggttattcccagaaagatccagtgaattgtctcctgaagataaaatacataaaagggcgtttcaaagtataaacagtgattttaatgaaaaataagaagaaaatgcttatgatacaacattaggtggaaaacgaaggaagaaaaattctgtgagtctaattatggaaaaaattactaagatatgttttaacatgccctagacatgcacagaaaaaaaagactggaaggaaatttattgagatgttattgtttatgagtgttctaattatgatttttaacaatatattatcagagttttctgacaaagaattaactttttattttttttgagacagagtttctctcttgtcacacaggctggagtgcaatggtgcaatctcagctcactgcaatgtctgcctcccagattcaagcaattttcctgcctcaggctcccaagtagctgggattacaggcacccaccaccacacccaactaatttttgtgtttttagtagagacagggtttcaccatattggccagactgctcttgaattcctaacttcaggtgacccacctgcctcagcctcccaaagtgctgggattacaagcatgagccactgtgcccagcctagaaataacttttaaatcagaaaaatacattttttaaaaagatgtaaagcatacatagaggataacttacaaatctgcatttcatgaccacatatatctattgagttgcccctaggatcatttttttcaaagctaatgtctgccacaaatgggagttttaataggttataattcatatgacttagtgttaaacctctacgttgggattcttaaatttaacatggataaactgaacttgatttcctgcattaaaaaaaattaaagaaatgaaagttctgactgttttattgtagctggggaattctttttgcaggtgatgctcatgttacggttttgaacccaggactttgcgttgcagttttgttcaggggttgcagaataccgatctgactttgcaggaatgactgtcttggtgcataagccattaacctctctgcgcccttggattgcctcctctcctgccagcagaagccaagtcacctcatctgtaagggagtttcattgaggactaagtgggaccaggccgaaaacgacccccttcccccataggaagtcacagaacagccaagccctggaacaggaggagcagcttcctcctgggcacagctgtgcagaaccagaggcgacgcatttgcccatcgtaaaggctgattagaaacagttgggtcccaagcagaatccttttgcccatgactgtgtccatggtcgaggtgtccattgtcactgttgccagatgccagcactggcgagggttttgccttcctaccgtaggcttcttgacccggcacctcggaaagtaactcctgtccattgttccttgtgccatctttcttaagaaaacatgaggaggagcagggtgatgctagatggaagcaggagagcctggggtcttagtttcagtggctctgacttcagttttctcacctcgaaatctcccttctctgaacctttttgcgtgctcttctgtctgtctgatattcatcatctgactcatctctaccagtcaggagttgcttcttccaggaagccacattccatggactgatacgctgggctccatgccatcctggggttctcttgagtacatctggaggggtgtagtgtgttgtaaatgcatacgatcatgctggtacatttcatcaaaggtggcagttacactaccagttgtgtgcccttgggcaattagcatcaccctgctgtgcctcagtgtttccatctataaactgggtataataatcattcctaccccataggttgctgtgaagattggctcacatcagtaatgtacttggaatggatcctggcataaaaagagcccttggaaaatgatagcgttcatccttggtatgacctccaagttctttgaacctcaaagagccaagtcccacatctcaggtacatttcagttcattctttctgagttgatttttttttttttttttgagacaaggtctcattctgttgcccagactggagtgcggtggtgcgatctcagctcactgccacctctgcctcccaggcccaagcgatcctcctgcctcagcctcatgagcagctgggaccacaggatgcaccaccatggccagataattgttttgcatctttggtagagacaagccttcactatgttgcccaggctggtctcgaactcctgagctcaggtgatctacctaccttggccccacaaagtgctgggcttacaggtatcagccactgggcctggcctgagttgataatttttgtcatttctttctcacttttctcaggaaaatcatgactgtaaaacagatcagttttgctttagttcccaccctcatcatcaacccctccccagctaccctgcaaaagagtcacagatcattgggataactagaaccacagagatccccctagacttgtcagccagggaacctgacactcttagaccttcttctgagtgctttgtccttgtccggagagctcggggaggagcaaggttgtactgggatttttttccgatcacagaaagtaacttagctagctgttgcccagccaatttgcccaagggagaggttgctcctgggttgcaggacgcatccatggatggagcatgggttttgggctgtggggggacaatgaggtggttcctgaaatccctagttactagcagacaagtgcatcagacaagtgcatttcaccgttctgagcttcagtctcttatccaagcagaaacatggccagaatgcaatgtcctaatacatgtaattcattacgtgtgttgtcatgtaatgtaacacacctattggcagtctctgacacaatacagatattgaccccatggtcttgccccaacttaaataaaaataaaaacgaatgcaaaagaggaatcttctttgcactcgtgtgatgtctgttaattcttggctttcttccttcataaggttaatcatctccctgtcacccctcccgcttgtcccccagcctctgtgtgtcaccttctctctgagctcaccctctctaggaagccttccttgctggaatgcccattccctgatataaggattccacccaccacgccccttgcggttccttgccggtgtcctgtcctgggcagacataagccctgtgggttccagtttctcattaggaacctggatgatggagcagggatcatgctcattaagtccgcagaactcatcagctgcttagcagggggccaaggagggctgagcctatgacgggtgaataagtctggttggcctctgggagtacgggatcagaattccaagtgactggggtcagtagcaggccaccaagagccatcccacctcagaaagacagaagccatcactgcaaatggcaagggcatgaggcagtttgaaactggcaaaactggacctttcatggaatccagggcttgagctttaatgctttacacttttgttttttcattccatacgcttttgctttagcttcctggcaaaattcagacaaacctagaagggataataacttacattcaacctctgcttgctctgtcctttctcacacgtgtttagagaaactggaggagcccgggaactgctttctcctctctaagagtcttggtggtttcttgtgtggaaatgaatgggaagttcaccctggttctgcaaaatgggtgcgaaatgtaaaatgtatataccttctatcctactctttatgttccacaaattttggagggaaactgattaactctctagctaccatgttccaggtgcctgcacctgcttgctcttggttaacctgcacccacgttcccccgcctgtctctgaagtattcacaggtggaggctcagatgcacacagtgattgagtgccctagctggggttggaaactctgtccatgaactccaaagcccacgctctcttacaccctcccaaaagctgaggcttcctcactgtcttttgcattatgtcatgggtggaaacatgcaccttccctgaccttttggcttggaacatggaagttcattgactttgttgcctagcagggcctggagctgggtttcttgcctgatcaatgtatatcattttgccaagagacagagtctgtgctggagagattgattccctggttatttatcttcctctgcccagtgtaaattggtcagcctgatcctattcgcatgataaaaatcataatgtctcaaattacttactcaataaaatgtgggtttgtctattattagtgattattagggttataatgcagcatggaaatttggagcaaattaactatacatgcaagctgttgggctcaagtgcagttaatcatacgcatacagtgccagtgggcagaaggttttgcaagaatagcttcaggaagactttgtgggaagacagatgaatactcagggtttttttttttttttcttctaacttgtcctccttgatcaggatttctcaaatgcacatttgtctaatatactgttgaaccatgcaagtaccaaaacaaaacaagaaacccagaattatagctcaaatttaattaaaatagcttttattgcttctattcatgtgtccctggattttaagtgatgcgtcagaatttcatgatgagcaaatgcctatggatgccctcatttctcatccttcttgactgtctgctaagattcactcttggtcttgtctttgagcttttctgttcagtgatgtaatgggacaggctctcctgtcatcaagagttcccatcatacctgggcactgccatttcctctgtggtagatgcttcctggacacgtgggcaggtgagaggtgctgactttgcctacttgcagctgaagagaagagagatgtagctttgaatggccacatgagtgtttttttaaatgaaaaaaaaatctatgtataacttgtttcctgtgagggtgccaggaaactttacaatgaacttcgtgaattaaacctctaccagatgaatagaggtggtggcatggtagcagaaattaggattaaaaaaatggtttttgatttatgaaaaatttttctgcaggaaattttgatttgttctttgtggattctgaggataaaattaagaccaacattgaggatgagagacagaactgaactcaacttaaaatagcttcagggaggaaaagcaagtgcattagataagtaagtgggaagtccaggggtagacgtgagttcaggcatagctggatccaggatccgacagcttgcatgtgtagttaatttgttccaaatttccatcctgcattataaccctaatgtttgctaataacacacaaacccacattttattaagtaagtaatttgagacatgatgatttttgtcatgtaaataggatcaggctgaccagtatagactgggcagaggaagattcataaccagggaattaatctctggatccaggctgaaatgatattatcagacacctttctttctctggtcctcagttttgatctcttctctgctagctttattctaagacaggcttagatgggatgtagagagcaaactctggaagtggagtacctctggcctccaaggccagtagttgtagcaaaagtccagggctgccgctcattcactctgctcggacctttctggtcacttgtcttctgtggtttggtccttgtggccagggacaatgaaactctcattgattaggcctgagttatgtgctctctcctagagccaggaagaggcttcggccctgcccagacccggtggcctgagagtcacagtgaggcgcagctcccaaagggagactgaaatataagcaaaagaaaaggaacacgtactgggaatcccaaacagcaaatgttcactgtgttcagggaggagtcttcaggcccacagtgtaggcattcaacaaacgctcttcagggagaaggaaagttaccatcaaaatccgtcgttgaaagtattgaagttccagctggcggtctgatacagcttagatgttgtccctgcccaaagctcatgtcaaaaggtaatctgcagcgttggaggtggggcatggtgggaggtgattgggtcatgggggtggatttctcatgaatggtttaccaccatcctcttggtactgtcctcacgatagtgagtgagttgttgggggagctggtcatttaaaaatgtgtggcacagccccccaccctgtctcttgctcctgccctggccacatgacgtgcctgctccgccttctccttctgccatgattgtaagcttcttgagacttcccccagaagccaggcagctgccagtatcatgtttcctgtacagcctgtggaactatgagccaattaaacctcttttctttataaattacccagtctcaggtaattctttatagcaatgcaagaatggcctaatacatggtctctgagcaggattattgtagaggggactgatgttgaagaatggaaaagaaggcagtgtcagagaatgctgaagagtgtggatcttaaagtccaacctcaaggcccagcgctgccacttaacagctctgtgaccctgtaaagtcactcagcctcattgagtcccccatcctcccctgtgtagaatgaggctaatgctagtgctcatttcatagagttgctacaataatcaatgagataatgtgcataaagatttacatacataataactgctcaataaagggtagatgttaaaattagcatcagcgagctctagaagatgctaagttctctggaaagatcagctctgctcctgtcaatctctccaaatgttagattttgcctcaaattttaggcattcgttcattcatttattctttcgtaaattctatcgcattaacctttacaagtgttaaattaaatcttttccccaaattatgcattagaaccaagttcttatgtggtggatgtacctcatttcagcaagagctttctaagggtacagaattaaatatgcagcctctgggattcagtgatagctcatgggacatttgacctacatggaaatgcaggctggagttgcattttaattggcaaggatcagcccagttgtccagcttgtagcttggagtgtggcctggctcccactccagagagatgtacatcatgatctgcgtgggtgagaggatactctcaggaaatgggcaaagttgccagctgacctctccagaaagagagactatgttgttagtttcccttacttggatgagaaatttctccattcctagtctcattttcccaatagaacacggaggcagaatttaaagcctcaaaacaatctgatgcacatcagctatcaatgaaaaggaccagcttggaggcagaggcacctgagttttgcatcttggctcaatcacttactaactgcattgtgggttaacacagtgtgtgtgtgtgcacttactaactgtgcaactgtgggcaagtgatgtaatctctctggagctcgtctttccttttttcttttcctttttttttttttttttttttttttttttttttttttttgagatggagtctcactctgttgcccaggctggagtgcagtggcacaatctcagctcactgcaacctctgcctcccgggttcaagtgattctcctgcctcagcctcccaagtagctgggactacaggtgcacaccaccatggctggctaatttttgtatttttagtagagacgggctttcaccatgttggccaggctggcctcgagctcctgacctcagatgatctgtctgccttgccctcccaaagtgctagaattacaggcataagccactgcacccggccacagttttcttttctatattgtagggataataatcctcccttgcaggactgtgctcagcacatgttcattgctcaagagaagtagccactgttattattattgtcagtatgtatccaagtgtttagttcattttctctgcatttgtctaactcccttttttcccttgaactgtaaagctctcagcccagggatatagtagcaccagcacatagtagatgatcaagaaaaattagtcattctctctggttcttcctttcctgtatcctgttgtctttatcagttcaggctgctgtgacaaaagtatcacagactggatggccttaaccacaattgttttacatggttctggagactgggaagtctaagattaaggcagtggaaggttcactgtctggtgaaggctgggctcctgattcatagatgtctgcccttcttgtgcatcttcacatggtgggaagagggtgagagagctcaccggggagtgtttctcccagttcctccccagtacacagaaaaacaaagctttctgtctcaccaggaggactccacggtgagcatagcttggctcagcccagcaggagattttgaaccgactctggtagattcttcctgcagccattcagctcccacctctttctctcaaaaagaaatccagggctgggtgtgtgtgggcaacttcaccctgctctctttgtcccccaggcctgcactacaacaaatgtctctttgtgtccaactcttcttccatttctagtccttcttttctcttcttctcgtacttcccatattcctaatacgattggttactcaaattcttaaacaactcacaactcattatctcccttccatgtaaaagtaacccccagcctgagctacctgaccccgtggtttaaacaataaagcaactgaccttttatcagaaatttgcaaagccatttaatttacatatgtccttggcatccacaaatattgcttctcctttcaaccagcatgccacccttccagccattcacatatgtattcattcattcattcatttattctttcattcagtcaataaatatttattgagtagtaagcacatgcaaggcattgagggtggggagggaaagagacacaaattgtccttaccctcatggattcaccatgtatttaaaggccacaaatacttgtgtgagaagcaagtcttaatagtctgaagtgttttcttagattcccttgagccgcaatgctgaaaagcttatggtggttttgctaatgaatttgacaaggccagaaatagaccagatgaagattgatccattggttaattgattaattgattgatcgactgaggaatgtcagcctggtctaccaaggtttatgaaagcctggcatatagaaatgatgtcgttaatgcacaaatacctgcatcctgtcttgaactccctctaggggccaccatgtgtatcagtgtcctgtggctgctgtaacagattactacaaattttgtggcataaaataacacaaatcgattcccttacagttctggatgtcagaactgggtgactttctcctgagactgtcctgatttttttttttttttttttttttttttttgcttgtcagtttgttttgggtgatgcagatggaaggtaacgtcacagggcagctgtattccaggtacttggtgactcttggttgcgatctgatgactggctcacagtaggaccatgacgtgagcagatttgtagtcctgcatgaatgaaggaaagaaagaaatctgacaactcattgattcagattcacagactctgcattttgaaccagaatacacccgagcaattacctagcacaaaatctcctgtctgcagaggagttgcaggaaggagaattcactatatcctctcctgaaaatatcccttgtggtcaaggtggctatagactggcatccctctgctccctaagatgccagggactcacgtcttctaggatatcaggggaagatacagggcaatgggcctcagatcacagacacggaaaatcattttctatttcatggagcatggagaagcttccttcaaaaagctagccttcgactttctattttttgaactgaagggcaggccaggagggagctgacctgtgtagagcttggaggttgtgttttcagctgagaaaagtgatcctgaacctctccatccttgcaaagctcagatggaagcccaggggccccagccctccagccccacacacatgccggtgcacctggactgccactctacctgtttacaaattacccccattttctgcttggttcagcagcaactgattaccgtcccccgtgatgtaattagggcttcagagttcacgtgtgtctattatgagctctcctgtgctttgtcttggtgcttcgtttctgtagcagtaatcatatatatatataaaaatttggtatcaattgtttggctaaattatgcacagtgggccatcctaacctgccattaacataacgtatgctaaagaatgtgttgtgtttttttgttttctctgataattatactctaaagcatcaattgcttatttgagtaaattaaactttgagttgttcttatttcttcaaactttcaaattgtcttgcctgcagcagatgcagacccagcactccggctgctgccagtggaggcaggagcctcgttaccacctttctgagaaattcaagtgccacacagtggtcaccagcattgtagctgccctgatgttccgggctcagctgcaatatagcacatctctaccaccatccccagagtgacctccagaactgtaagggacccccgcctttggtacagagatgggagttaaacacaggtgtccactggagtcatgattcctctattccctggacaaatatgcaatgagaatccctgagggacaggcactgtgctagatacccgagatacaaaagcgacaaggtttctatcctctgacagtttatactttagtgcagtggtcagcagactgtttctgcaaacagctagatagcaaatattttagactttgtgacccatacagtcaccatcacaactattcagttctgccagtgtaactcaaaagcagccatggctgttacataatgagtggctgtggctgtgtgccaattaaactttatttacaaaaacaagaggagggccagattttgcctttgtcaaggaagtaagcataatagtgcaagcagcacgtgcccgctctttcacactggggcaaacacaggggatttattcggcacaattgagtaatgtggatgaggctgctcagggctggcagttgtaggacgcaaaaccttgaggggcatcgatattctggtacagctgtcacccatttgcagcacagctgggacactccacagagaatgatcaggaaggccaagcccagatggcattgttgaggggctttctcttaagactgcatctgagtggcagggcgcagtagctgacccttgtaatcccagcactttgggaggccgaggtgggtggatcacgaggtcaggagttcaagaccagcctggccatgatggcgaaaccccgtctctactaaaaatacaaaaattagcctggcgtggtggccggcgcctgtaatcccagccacttgggaggctgaggcagagaattgcttgaacctgggaggtggaggttgcagtgagctgagatcatcccaccgcacaccagcctggccgacagagtgagactctgtctcaaaaaaaaaaaaaaaaaaagttacttctgagttaaaatatgaagagtgagcagtacccagccatgcagaaggacatggagtggtaaaagcatgtggttccattaagggaaagactccagggcaagaaaaaaacatgtcatgcttgtacctgagggaaggccagtgtgattgcagagtatggggcaccctggaggtctggaatgggaggagtttaaacaggtcattagagcttcaagatgaagcataggccagtgacttggttgctgctgctgcgtaaccgtgtggcaactgagtggctcacggcaatcagtatttacttctcacgtgtgtgtggggttcagcagaactaggctgggcttggctgccctgccctactggtcctgctggttttggtggggcttccccctgtgtctgtgggtcagcttgttttgctcctgcatctttgcatcagctgggctttctgccctaggctggacatgggtggggcactttagctggggtggttctcctccacatgtctctcatcttcctgggaccagcagggctagaccagacatgactttcttatggcaagggcagaaatgcaagacagcaactcaaaacacataaggactttcaagtctagacccagaactggcatacccattcctctgtcacacactgatgccccaaataaatcacatggctgagctcacggttagagagggaggatactgcagtcccaaagcccggggcatggatccagagaggagggtgaagaatgggcccctgacccaagactgcacttgtatttgagttgcataagaagctgctgaggaattttaagaacaggagtgacatgacttccgttacaattgaaaaaatcaatctggcgaaatgaatggggctacataggttgggggaaggaggtaagagaggaagtgaggagaatagggtgggtcgaacctgttgaaggcccagagcttgcttctcttctgccgcctttaggaaacgagatgaattgttaaacttcttgcactgagctttaccaggtgagctgacagttatcctctgcattcatcaatataagccccataaaaggcaaagtggttgaggagaaacgagaaattacagcccagattagcagccttgagtgctccttgtgaacacaagacactgacccaaatcacacgtcacggctcttcgcccattaacgcttatagcaggattattcccaaggaagctgtagccattatatttgctgccatcacaacagtaaaataaacaggtgtgactgcagccctactcctcgggttgtttcatgctgatcagttgttaatatatgtgtgacttgaagttggagcctgttgggagaaaaagttgtctttagaggagtaaagtgttgccttgctgtgggaaggggaaactttttcttgggaagtggactcaccaataatttttgcatcatgcgcaggagaccctactaaaacctaagtgtgcaatgctttaaatcagtaagtttgtttttcattaacataaaatccaaaacaggtgctgtgatcagcaagccgctgtcctccaagtggtaattcaggaacccaggctccttccattctgtggcttcaccttgaccaacgaagaccttttgaggttgccacattctccaggccactaacacttatgtcattggctacaactcagtcacatgaccatggctgcctgcaagggaggctgggaaatatagtttgctgtgtgctgggtgggtgggagggagcgtcaacattagtgaacagccaggcagtcgctgcctcaaatttctttagtgttatcctttcatgccagcaattgaatttgatttgcactgtttcacttctctacaagggtgtaaaaagtagaggttcctcttgaaagaatttcctccccatctaattaggaataaatagtaacttctcttagaagcaaagttaattcaaagacctgtgctaacattcttaaatatctgctagctgtaatgaagaaatcaatgtactttatgttcttagctcccacagtttagcctaaatatttgccctggcatgcttatactggtccaagcaagcattaggtcatagcctgttcctcttccttatttgaaggtgtttttacctttctcagcattccacaagttacttcgtccttcctttgttctcctctgcctttgcctcttttttctttttttattttaattttttttttttaattatactttaagttttagggtacatgtgcacgttgtgcaggttagttacatatgtatacatgtgccatgctggtgcgctgcacccactaactcgtcatctagcattaggtatatctcccaatgctatccctcccccttccccccaccccaccacagtccccagagtgtgatattccccttcctgtgtccatgtgatctcattgttcagttgtcacctatgagtgagaatatgcgttgtttggtgttttgttcttgcgatagtttactgacagtgatgatttccaatttcatccatgtccctacaaaggacatgaactcatccttttttatggctgcatagtattccatggtgtatatgtgccagccatcccgttactgggtgtatacccaaaggactataaatctttctgctataaagacacatgcacacatatgtttattgcggcattattcacaatagcaaagacttggaaccaacccaaatgtccaacagtggtagactggattaagaaaatgtggcctttgcctcttttaaaaagttctaagttgctagccagtcggaacaaatacagaatgtgaggtccctttccagccaatggaaaccggacacagcagtagagtacacgtgtcaggttataaatgagcctgtctcctttgtccggtgttctctcatggcaaaactgctggcgagtgtaccctttctgcagaaagtaaaaatggccttgctgaggaaattaaattcctgttcgagtgctatttctttatggcactgaggagcaagcatttctaacaatcatattgcttaagaagtggatggcaagaagataattactaatatgtctgcaatcgatctgaaattgacacagttgatctcactgattcatggggaccctgggagtatgtttgtgtatttgggggttgggatgggggggtgggtggagggtcagagaggtggcaaaagcaggtgggaacagggttacagagcaaagtaattagatgccctttagatgctcttagttaaagaccatgcaaaaaggatgaaatcttttgatcatgttcttcacaatattagaggtaaaacatgaactcaacgcttttaggaagaaacaactggattgcgttttctattttattgacagaaactagatggggaggccagggtgtgttttattattgcacacatacgtaattacaaagtctttgcttttttcccctacataaatttattttgagatttaatttccaccaattagaacccgaatgaagccgttttaatgtgattcctgcatcccagcaacgtggccctgcttcttagtgcgcacgtaaagaaacaatcctggagtgaattttaagtacctaaagttgtgttagactgcaaatgaatatccaattcaatttgtaggaaactttagattaattaggtttataatttgcacagtaaggtaatgtaaatgtgttgctacggcttgactttttgcttaatcctctgagtggatatttaatctttttaatattagaattaaagcaacttggaagatatgaatattaatctaattatattccgatcactttaatttctttaatgttttaaataacaaaacaactttacaaattggtttaggttggggaacgcttttagaggattttgcatctcatcagtaagtgcaatttagaggatgcaggcttgggaagctgtaccttaagtttatagttatgcaaatgaaaaccattaatcctggagcctctgacttgcaaggtgtgcttcagaaatttgcagcttctatttaggtaggaagagtttgccagcccgaaaactccagtaagcaaacagctttatagtaccccagccatagaaagtgagagctttcgaagaatctgtggttagaactaagaggatttttctttctcctttttctgctgttattatctcaaggagagagggaaaaaaaaaatcagagcaggacatgaacagtgcttgcaaattttattacctcattataattgatacctgctctctgagccaataaaagaagctatattcagcactggctgtataagatctttaatgttttaggctgtcaatgttggctgtggttaggctgacataattatgagctgcatgtaccaatatatagctctttacccacaaaagcatgctgcaacggggaatctttcagagataataaaaggattcatcaagtgtctatacgatagctacttaaatcgctattgttttagttaggcccgcaaaacatatcccccagctatcccggtttcttatctttcttacttgatatttcaggaatttcaagcttttgtacagcttgttcagttgcatcctagaggaggaaaatgcttttggcgtgatttccatttcaagatgacaacagggagaagtctttccaaaatgcgcgtgttgcaatttcagatttaatcaggggaatacattaatttctggaactaattacagattttaaaagagtgatgggtctggtacagtggctcacacctgtaatctccacacttggggcggtcaaggtgggaagatcccttgagtccaggagttcaggaccatcctgggcaacatagtgagaccttgtctctatgaaaaaatgaaaaataattagccaggcgtggtgtcgtgtgtctgtaagtcctagctactcaggaaggtgaggcgagaggattgtttgagcccaggaggtggaggctgctgtgaactgtgatcacaccaccgcactccagcctggatgaaagagtatgacctttgtctcaaaacaaacaaagaaaaatcataaaagggaggcagaaaattaactgaagaaattgtgttataaaaggcagtgttttaagttctagaattaaaagcaattgcagcaaataccaagtgagattttctgtattttgagagtttgtgtgtgcaatggttttccactgactaatcaggctgataaaacaacctgaaaatggctttcccatggagtttatatatttcgtcagagacctaaaatggtataaatgttcaataatagccagtgaatataaaactaaataatccatatgagacaaaacaggtagaagaaaaaaacattcctcctcagatatgcaccttttaattgaataaagcaaacagtaacagtgattaccaggacacttgctgttttctgttattttggtttatattgcttaattagccagcctttctaattaacattacattttgctgagttcacattgtgataaagatgaatatcaattcttttctactcatctcattgagagatagagttgaattcatcttcccttgtatctaggctgcacttattcgtttgcttgaccaatggaatgtggctgagtggccgtgtaaaatgcctgactaccctgagactgccatgttgaaggaagcccagctagccatgtggagaggccttgtggagcgggaaatggccaacctccatccattggaagtcatcccatttgaggccctagatactgaaaatcagaaagaagttacttcccattccccacctcaaggccctgtccaaactgaagattcatgggcagaataaacaattgctattttttaaaggtgtatgtttggggttgtttcctacagagcaatgaataaccagagcaaacacccaagggcaataaattatgaatagtgaatttaatttttctatgtgacctatggaatcagcctattttatggcagtacaaagtatatgtagcaaccaaacagtttcttctttcctaaaactcaaagtgagtcagacttcttaggcttgtagatgttgaggactaagctttgctctttatcttctctttatggatttccctttggaagcagggataagaagagggaaggtctcccagatgtaaatttctcataaatatttgagctccatttcagtaattctttcattctctgatctgttgcctaatcttctatttagcaagtactttccatgaaatagaaggctttaattgatagaattactaatttgaatagcttagcacagctcagcttgtaaaaaaaaaggaaaaccactatccccattaaattctcatcttgtaaaaccagccatcagcacctccctgtctttttactaaagtttcccttctttggtctttagtgctaagtaataggctgtcactagaccaaaaaaaaaaaaaaaaaaattcagcatttcttttcattggaggttaccccagaacacttaaactttggagaggaaaatagaacccctgaagaaaagtgaattctcatgacaatttgtacattctttgaagaatgactgtaatacatggaggagttaccttggacccatgtgcagagtagtgtcgtgaatgaggcctgtgccttgtcctgtggtttaaggataggtaaatgtatctggggcagagggttgcctgggacaaaggcattataagcttattcatttaacttgagtacagggtttctcaagctttggcactgccaacatgtggggttggataattttttgttgggatctgccctgtgcattgtaggatgtttagcagcatccctggcctctacccactagatgccagtagcatcccttccccctcttgtcacaaacacaaatgtctccaaacattgccaatccccctccattaagggtcatgtctcttggctgggataagtcttctctaccgtatccctttaactcaagaagtttttcttgctaagtttatgtgatcttgaaaatacggtgagattgaacttgattttctttaaaggacaaatatctgcttcttccaaattgtcataggaatagttcaaagctaaagagcctttcaggcaggctgggcacttcaaacctacaaaacatagtgctaaaattaaggagtgtatagtcgtgtgtttatagggacaggatatttattatctatcacttttgaaaatgtcattggcattatcgttcacttttacaaatacgaaggaaaaatatgaaggagttctagaaaacaccagaagtgattttgccgccatgggcctgaattgaagagcttaacccactaatctgttatgactgcttggggagtgctagcgcaggttctctaacacactgagagtcgtttggagggtagtgtgaagtggcgttatagttctccttttaatggttgagacaagaattgcctggacctcttttaggatacatcaccagtcttccaatggcaaacttatgtttattccagctgattctccccagcatgggggcatgaattgcagtggaaatcagtggactagaatttggatgcaattgcccccaaattatcgaagagaaaagaagaccactgtaattcaccggccatagcatttttaccaactgtttttgctaagcattagtttcttgtgataggttcaattctcaggctccttctcattagagtctttctgtaaagaccattattatttctgttatatttcctgtggctgagctgagccgcacttggagatttgatccattttaactctctcattgccttcagagagttggtgattttggggggggcaccagtgtgagtcctttgatccttgaatgacaatttggatttgtctcaaggtcctgataaatgggaactggaggaactggcctactatggtattacaggctagcacatggtttgcattctgagggagctcagaataggcaaggtagaagacataggtggtcaagaatttagaaagacccggactcgaatcccagctctgatccatctcagctctgccatattgccaagttccgctgagactccatttactcacctgttgtatcatctgaattatttccatatccataatgtgcaaggatatccttccatgttattagaaatacagatacaccatcattatcagtggccaaatcattcaaatcgctgtttgcttcttctcgggctcttattcaagctcacgatgctattctcatagtgattgcgaatctcactgcataaaggtgattttgaaaacatcacttttcctccacactaatgtgtgagcttagccagagtaggagatatatcttacttaaaaaaaaaaaaaacaaacaaacaaaaaaaaaaaactccttcttcatttgttatagttccaggatagagtgtgtacctgtatagagagagtcaggcagatacaggtgtgccctccttccaagatgtgtgatggtgggcaactttctttgcatctctgagcctctattttctctatataaaatgagagagaaaaaaataattcctagatctagagttggtgtgaggctaaaataagctgcttttagtatcacatttggcaagtagtaaactctggataaatatacttttgaattgtgtgattattgttgttaccatttattgaaagggaatgatgaatgtagtgagagaaggaaggaagagagagagggaagaaggggaaaaagagggatggaaaggaggaaggaaggaaaggagggaggaggcaagtatattagtcatgatatagggaattgaaaagacattcacgttttgtggtgaatgaaaataacttgacctttatgaagctggcctaatccctggaaggaaaaaatttccttggatatgtgatttatataatcaatcaactagtccttattttggtagagctaaacttctgtctttgggtttactcaccgtatctgtgtgcatcctggcaatgtttacgatatacttctactaaaatattattttattctatactaacaaagggatttgttgtgtgtgtaaaattcaaatttcaatgaagattgtgtatttttatttgctaactctggaaaatgtgtttacagaagaaccagagaaggacttactcctctccgtacactttggacatgtcaaaatctagaaatagagatcagtaaaggtaacacatagcaccttaaatctgatttaaaaggaaaacaatgactattatacagatttatggcttcttgtcaataatactctgatttctggagattgttatcagtcataagctttataggaaatatctccttttgaaaatgacattttaaattaatgtgaaattgtgttttaatttaattcacagggagtcataaacaggtgggagaattatggaacaataattgtgtttgcaagaaatggatttcatcctaaaactccatgaatatgctattacagtttgttgtcatcctgaaatgctctgtttaaccataaaatacagcgtaaaagacaccctcatgttgaagtccttaatctagtgtgtaattgcttaagtgagcacattaactatatcgtcaactacctgttctcaaacactttaacaatcagctcaccaatatgggtgtgatcttgacattgagatgtagagcttgacacctgcatataaagtagaaactcaacagtgtttgagaatttgccattgcatctcagtcttttttatttatatgttttttctttttttgagatggagtcttgccctgttgccctggctggagtgcaatggcgcgatctcggctcactgcagcctccgccttccgggttcaagtgatgctcctgcctcagcctgcctcccaagtagctgggattataggcgcatgccaccatgcccggctaattttttgtatttttagtagagatggggtttcactatgttggccaggcatctcaatcgttttactaagaaatttggaggccttgagaaatgggtaaacttgaaacatttaaaaaagttgttctgctaattatcctaccacgtgtgtcagagacaacattaccctcttattacttaaaagtaatttggactggttcgcacacacaaaaatagctttattaacaacttgagtaatttatcaagttcagattctttttttcctccagaaatgctgcttttggtacactgagaggtcattcatttaaagtttgtccttggcaattccttattgaatagattccattttattttatttacattttgtacaaagctgataaataactgaaaccaaattagctcaaactggttatatttctgggtacaaaccaggtgtatagttaatccattgttgtttctgtgtcaaccaccattgtcctcacctatacttgggcagtgggggtggggaggagaacataaaaacccaccaagcctcatttttcttgctaatttatttccttgaacttggtgagattctatctgcagtgtttccaaaaatagttttggaaattgcaaaaatactacaatgctgttgtgccggccacactgtgagtgctgactgtcatgcattttatagcccatgtccctctccagtgaggcttttggccactggccgttaattggtaaggttcttgaaaactgaagtgatggtatcagcatggatgcccgtgctttctgatgccactgaagatggatagaagcttcaagttatgctttgtgcagactgaatttttccaatttgtgcttagtagcatcttattatattagaccagcactgactggtgatgaatagcaagattgctcccttctaagggcttggcaaaccaagaagaatgcagtgacatatgtcttatgtcttcaaaagcaactggacacttgaagagtattttctagtctcattttgtaaacccaattacgagcggagctacaatttttatctttgtttaatgtaaccaatgaggccattgtcactgtatggagaatagctttagtccatattctctgttttttaagactctcagtctccttgcaggtgcctttggagagttaggtgtttgctgtgatttgagggatagtggccaataattttattgaaatgaatattggttaattaaagcttattgtatgccatgggccattctaagaacttccatccacccaaaagcactatgaaatagatgttgttatttcactgatggaaaaacaagcacagagaggctaaggaatatgctgaagcttgcacagctagtaaatggcagaacattcagactggaattcagacttatacactcacattcataccacacagcctctcgaagggacgtgccccttgaacgcaagagaggtacattgggtggccatggtgctcacagtctctcaatcctttatgttgagggagaaatgataaccagatctcattttgtgtgccaacccgaaagcctgacttgactgcctaaaatgttaggaaggactctaaagccctatctggattccaaatttatggttggtgcagactggatttttacaatttgtgcttagtagtatcttattatattagcccggcactgactggtgatgaattacaagattactcccgtctaagggcttggcaaaccaagaagaatgcagttccacgatccacttggaatgtgtgcagtgagtgtgggaggactggtataagtagcaaagcacttggcactctgggtgtaaagcattcagatctcttgcaaaatgcaaattttacctgcggggatacccattcaacaattagaagctgctgatttctggacgagagttagtttatttagaaagtaacactcagagacactgggacagagaacagatccattttaaggctgtgtgagcactgatccatgacagtattggttcaggggcaaagaatgggaggaaagaaaaagacaagttatagctgcactgaaaacaaactgggcatgtcctaattttgctcagggctacttctcttagagtcgttaaggttttgagcatattaacagcaatactgatcatagctaatatgcctctatgtcaggctctgtactgggttctttgagtatactcaccacctcctgacaaggttttggcagccttacttggtagacactatgattcccattacatacatggaatgtacagtaactgaggatcactgtgatattgggaaagtgggacttcagacgctagcctccccttgtagtgcctgcattcttttcacagcccctccccaccttagaatcattttcttcaagggagagtatggtttgtgatgcccttatcagcaaaacttcagctagaagatgcaagggtgaaatacacctccccaccccacgtgatctcatagcacagaatgactggccaccccagactgaaggttagggagactgggggccccagactcaaggttggggagactggggagagggaaagcgaggaagaagcgtaagtgtatcttacagtttaaaaccataatgggacatatcattttcttagttctccatttattaataaaatgcccaataccttctggcatgtgctttgaactgcttttaattatcttcagttggatggagaaaaggtaatggggacctcataatagtcgtggagggacaactgggatttatttccatagggaaggcagagactgtttgccagggaaccaaggcctttcaaagttgaggacacttcccggtgccgtgcggtgtaaatcacagtgcaaactatgcgattatcccctgcagaggaatcgagtgtgactttatgggattcttcaccaagcacttaggaataatctgatataaaacagcaggggtggagagtaatgacaacttcaaattagtttaatgaatgtttacatttaaaaaaaaaaggcttttctgcaaacctgaaaataagaagtgacagcttcctttcctatttcccttgcaagaggtacctcctggttttcagcctgaggaggaaggtggctttatttaactccttcagccccggaacatcacagggcccttctttgtgcattctgggttctaacagccccttgaacagtgcttgagagtatttccattataaatgtcgaatcggcattgaaggaacatctgttttaagtcaacttagactcaatccaggaaaaaaaataaatttctggctgtccacctgctcaaaaggtcaattacccacccaaatcagccagagatggctgatgggctacagatgccgaggatatttttagcaggattttggcaggtaccctgcttgttgaatgcagcaaagaagagggaggttgataaaccattatactgtttgaaagttggtgccgcgccaaatctcccaccaaatctggatggtgcttttgagctatttccccacttctgctgaagaaggattcatttcagtagaaggagtgggataggaaatgttcacattgcttgcagtatgtgaaatagacctcgaggtattttggataaaaaagcaacattcgtgttttagatatggttacccagcccaagccgcctctgctctttatagccgtgtttttgaagtgttcttattttttgttccgaaatcggaatatttcctggcgtgcgtatcttggccccatcacatcacaacaggctgaatgctgtccacaggttgccagtctggatatggaatattagtcaaaacgatataaactaacttggtctctgctataggagggacaaaataactacaaaacaaaagcaagaaataaaacaaaaccaaacaaaagcctgcagtgtttgggcccctttcagggatatctggaaaaccaaatggagaattccaggagcggatttggaaacaaggttgggtctactttggcctttaagccatcactagaaacactgactcttgcgcgctagagtgatgtttttccttctcttttggattgacgtgccagcacctcaagaaacctctgtgaaaaatccacaggtcttcaagaaccagaagaaaacagaataaaaatagctcaaaataaaaatgaaaatgaaaatagagcaaacatccatttctgtgggacctaaagagttgggaaacctaaacaaccagatgatgatagctgttgctgctcttcctgaaatcaattttaaagtaggaattgtcaaagataatgagactagtatggagcaaaaactggcaattttcagttaaccagaatgttgcatgaattagaaccccagattttcctggagatgactctagccaggccatttgaggacaagttgccaaatatttgtattttagaagcctcagaagtgtgcacaattttctagttctcaacaaggcactacagcaacatgtctagtgtttatgtaaatgatctttataaatcctctagctgatagagagttttcttccatcacaggcaaaatgtgggtttagatgcaatttgtaatattgttgtacaagagtggggtcctttcactgacatatacgaagtgttgtaatacaaggcaaagaaaatacaaacccatccttagtcatttagaaagacaacctggttgagaatttaagatgatggtttagggcatagcttgtggaattcgatgggttgcactgtaagtttcagtttccttatctgtaaaagtaggaataatatctagacctaaaggttattttgaagattaaatgagataatgcgtgaaaagtgctgactcagcacctgcagaacccatgcgtcgtcatcatcacgtttgttgagggatttgaggcgtgtctaggaacgcagatgtggagacacctggagcatcttcaggagctgtttctgcggattctcatgtggcttatcaagcacaggaaatagttttcctggaaagacatggagcaaagcagttatttagccgtccatccggcactgccaacctcttcgtgttcctgcaaggattaaatgagagatggtgacagtagagagtcagccctgagggaggagtgtacaattcatgggctactattccatgtgtgtgggtcaggagacgcttaaggcattcacagcactgggtgtgaggaaggatgcaaataagcttaacttatttatgaattatctgccctggaatggcattctaatgttgtgttggaagagagacaagaatgtgctgggaggatactcagtttataacggacgttctgatggccagtgcaaatggcgccaggaatctgtgtttatagagatggagcatggatgcccctgagcacctgtgtgtgtgcgaagggtgaatgggttgctgggagttcgtcggttgtttagggaagcacttacgtgtatgcctgtgtgtgtctctaggactcactctccacttcccaccttacttattattagtgttcttgtttctcttcgctatggggaaatgcagataaaccgtaaaaacttgatagagtgaacaaaggcttcggaagcttccttagttcttataattgctcaatgggttcttcttgcctgctgcacaggtaaaacccagttcactgagatgacattatggcaggaaagaaagagtttaattaacacaagtccagccaagcaaaaggacaggagtttattattacccaaatcagcctccccgaaaatttggaggctagtgttcttccaggatagtttagcaggaagggagctagggaatggaaaatgctgattggttggggatgaaatcattgaagtgtggaaaatggtcctcgtgcactgggtcagcctcagttccagttgaatcacaagtcccaggcctaggtggggtcagtgggtcatcaaaatgcaaaagtctgaaaaccattccaaaaaaaccagtcttaggttctacaatagtgatgttatctacaggaataattggggaagttccaaatcttgtgacctcctatgcctacatcttagctgaattcagacccctctcctaatcctaaccttgtggccttttaggagctttacaaaggtggtttcatttcgggaaaggctgttatcattcttgctttaagattaaagtataaactaaattcttcccagtgttactttgccctatgcccagggatgagtgaggactgccagcccgtggggctagaagcaagatggagtcagctatgctgtcatattcctcttatggtcacaatttcacaaaggtggcttcattctcatgaccattgctcccaggcattgttcttgaataccttagaaagtttcattagctcatgtctctcctctttgtaccaccttccaacatttccctactgccttggacattaaagtccaaatccagtctgttcatcatgatctgtggagcctttgataatcgcagcctccagcttctccttcacacctgtctcctgtctcctgctttttctttttgtgcactgcccaagaaccttttcatctactaatctttgagtttgccgtcctctcttcctaaatcactcccctccctccactgttccacgtgggacgttccttccagagaggcctcccttaagcccaccttccatacctcctctggttatcctcagtcatgaggccctgcttcctcccgcacactgagcacaggcagtacctgctttactcatgtacttgtttattatctgtgtcacccagtgggacatagtagactccatcagggctgggaaggaatctgccttcgtcaccattttgacatcattatcaagtgcgcaattaggctcacagttgagctcaacataggatctgtggaaggaaagaaggacagaaggaaggaagggggaagggaagaagggaggaagggagggaaggaaggagggaataatttccaggaagcctcattggatttctttcccccttatttctgaaagctcacctctttacagctggcaaggccagcagaactgaacaatagagccggattaagcaagcattcaggtgcccacttaattcaatcggcgaatttgcatttctcaggctctgtgccatgagagcctgccgcctcaagggaccacctgccttctaccagaaggactttgctccttggagaatttccctctggcaatggtccaggtcaaacgaggtaccatacaaatgtggcttgtcaccattttccagtttaactttctcaagccttggctgcctcgatttcattccagactacagtagcagctgaaaaggtagctaccattgcagtcgaagacactggcagatgggactggcttgttggcagagatggcagagatggcagagatatgaactatctctgaaagggcattctgcatgccacagttaagtgctctgttgaaggacggctctggaagggagcatccgcgaaatgaataagaaggtggttattagtgaggtctccctgaaaggagcatagctggatgcaatccttggaggccctgtctagggcctgtctggggctccagctttcatagggccggccatcccctttgctctgggtgagatctgtctttgcttctggtgattctgatattcactatcgagaacgattgctttaaaacacatcagatcaaagttttctaaaatcagagtaaaagctaaaacctttgcaaggtcctgcatgacttgagtccctgttcctcccttgacatcaaaatggctgttgtctgctctcgctctctctctttctctctctctgcttcagctgtcctgacctccttgacctttcttaaaaactttatgaaaactccacgtttgggcttccctccacctgagatgctcttctcggctcctgtgagggctacccctttaccctttatagtgtctgcccggacatctcctcactagagaccttccctgaccactgccacatggaatagtactaatacttcatgctcatcctctgcctgccctgggtttttaatttgtgcgtgtgggtggggtggggggcgggggggggcacttatcaccacctgcatattatgcttttgtgcatttcaggttggtctttcccgcaagaaggtaaactcatctgcagctgtattcgctgtgcctatggtagtgcctggcaaatgcacagaagtgggtattactgaggactttgtggttcgaatggaatgagtgtgctgctgacagtgttgcgagtcatctgcaaatgaaaagtccttccttctcttcccttctggaaccttccaaagaggctagcctcctgagagggcgtctcctgggaatgcctgtgatccaggcaaggcacctaaatcagccaataaataattagttttgagaaaaaagcctgcacaaaagcagaactcacagattttctcattgatcttcctgcctttgccttggccatggtcagtctttggggctattagctgcatgtacaagtgcacaggggatgggaggggggctccggaagatccctaacccattgtggacacaccatttatgttagtggaatctggtaagagtgattgaggagagagcattgggtgaatgaccctgtaatccttataaaaatagtagcaacggtaactaatgatgtttatgaactgcctaagaatgccatgactgtgtcaagcacttcccataactagctcatgtaaagcctgtaaccatcttgggggtgaggacaattatgtcccattgtgttatgtgtctgtgtttgcaggagttgttcagtggtaaggtgcagtcaggacttaaacccgtgttcctgagagtagctctgtgctgcctgacacactccttcctcctgaatgcacaatcatatgttcacgtgccacatggttttcagaaagcactgcacgtgtaggaagctcaagacagagacgtggctggtcacggtggctcatgcctgtaatctcaacgctttgggaggctgaagcaggaggatcacttgagcctaggagttcgagacctgggcaacatggtgagacccccatctctacaaacaacaacaacaaaaaaaaaaattagccaggcgtgggggtgcatgcctgtgctcccagccactcaggaggctgaggtgggaggatggctcgagcccaggaggccaaggctgcagtgagatatgacctcaccactgccctgcagcctgagctatagagccagaacttgtctcaaaaaaacccaataataataataataataataataataataataataataataaagaaagcgagagaggaggtagggaatgaatgccgaaagtggttccttgggtctgatgcccacgcttaaccgattcccagccaaacatttcacagttgtcttacgcacaggcgtaagatatgcatctatcttggtgtgcacctgagaagtagttatgtctaagtttccgacttgacttggtagagtcatttgatcagtaaagcgcagagcagatgaactacctggaaagaaagtgccggaactccccacgtgtgacatctcacttcggggaaaggtgggccctgcgctgcgcttggcgaaggtaaatgcacctgggtatcctcttgacctggaatggtggaaaataaagaaaacttcagcatgtagcaagtagttgtgagtacgattaatgctgtttagagttgccagttctcttacgcactcagcgaaggccgtgtggcttcgcattaatcaccaccaagccaacatgagcttccagcaaaagagcccagtgattgggaacaaattcaaaacagctttatttcattgacagacaggacctttttgttaaactgtggtttaaagacctttacatctctgtcttgttcacacgttactgtagtcatttacgtaaacttaggaactaagaaccgacttatttatcacaacctattggcaggaaaagggtcacataaaaaagaatctttattggtaggtttttttttttttttaaagctaataaacagtgctagtggaaagtatgctgttatcaaccattattgaagtaagtgggtttctggactgaaaaaaaataaagaaaacatctaaatgtcagtgtgcaaatagaaagtagcagtcaattaaatgaggcagtgtgtggtcaccatagatggccaatgtctgtgttattagggaaagaagagaagccgggaaggaggaggaggtttctggggttaacctgtgttttgctaactggtgttagttagtctcagataagagctctatgtaaaccaactttggcccaaattgactcattgaaaaacaccttgtttcaaattttttccccctctatgaccaaaaagttacccaaacctttgtgtcacatatttaaggatgttcaaggcaaccaattagtattcaagcatttagaattattttgaaacatcttctgtgaaaaacaatttatttcctattccaaaataaatgcagaatattcctaatatagtttgatagttcctcctcaagacttatcattcaaagattgggcaaattgacttgaaagagaaaagttaagctatttccctaataccaaggcaatgcaggtcagctgcagtgcctaatgtttataaaacttgtaaatgttgaaacccacacttggtctgagagaacatcatgctccagtttgttcttaggaatgtgtttctgatgtgtgtgtgtgtgtgtgtgtgtgtgtgtgtgtgtgtgttttccagaaaccaactgggaagggccctaagctgagattactgttgagaagtaaattgtgcttttaaagtgtcctccagcaaaatggtctcctggctgtctttggaaatgacgtatcagtccagatgccctttttcttgatggattgctaggatttttactcaccaccgatggaaaattctcatagtctggaagggtggagcgtctgccttctatcatgattgtacacagatgagcaaagctccttggcaatgagtgaggcagacgggcagtcaggttcggactggtgcagcaggtaggctgctgctagggaggaaggaagaggcacagaagttcagggcgtgagagggtatgcgagagatgtcaacaatccaggagctggcttgcttcttcctttagtcagtggtgcaagcttcaagtggataattcaaatgaatcaatggaaaggcctcttttaacatttgatttgtttcttcaaagaacacagatgaagtttttctcatctctttagattagtgattctatattggtgagggagtggaagagaaatgtgggtgtgttgactatattctccacagaaactttttgaagtagcatcgtcactcagcacagaacattttgacaatacacttccagggcaggtggtttcttactatgtccctccctacccccacatactttgggactcagaatgtagggagtgtactctcgagggatgcagcccatacgtgaatgcatggaggcagcatataaggttgcaaagcactgaccttctctttttatgattcccatttattccatagactgtgaagtctgcctgtacatttccaggctagcagtttttaatcaaatgtatgatcactttcttctgatgaacacagttaaggggctttgttgttcaggtgagtctcacattgtactcctctcctaagagcatttattattacttgctacatacatttttgacaacctgacaatgacttttttgtcttaatttggagaaaacatactctgagcttttgaagttggtgtacttgttaaaggaagccagaaaagcttttcaaccatttgagagggtgtgaaatacagaaggggttgtgcgtttcttcccccctcatctcttagagccctgttacccaagagagttcaccaattacccaaaccaagtttcattttgttttctctctagtttgaaaactgtttttattgcttcaactctccttgtctaggagagctgtttcaggtttttagagtcctaagaaaggcttcactggctctctgccagcctcctgtcccattacacgctcaggcttgtagtcagttactctctgctggttttgctaaaccactcttgggtctttcttggcctcctgccccgcattccccttcacgttgtaaacgtagctttttaagttggtcccttgattgcttcaagtaattgatctgttggcctaaaaatgagtggctctgattcagaggtaggagttaaaccagattctgcctagggacaagtgtgttgggagctctgcttctctggagacaatggtcagcagtgttgcaaccaactccatgtctggtgcaccagatggtctcattgggtggtagggtggccaaaccttgtgtgagctggctcacttgttcattcattcattcgtttactcgttcttttttgtattagcttaaaaatgcttatacgccggccatggtggctcatgcctgtaatcctagcactttggaaggcagaggcgggaggattgcttgagtctaggagtttgagaccagcttggccaaaacagtgagactccatctctacaaaaaaagaaaaataaattagttaggcatggtagagtgtgcctgtagtcctagctactcaggaagctgagatgggaggattgcttgagcctagggggttgaggctgcagtgagctatgatcataccactgcaatctagcctgagtaacagaatgagactgtccccccaaccccccaaaaacagaaaacagtattcctatcatatgcattctcaactctgcagaggtcctgggtcacatttcctgcaaagttgcactgcctcccataggcatgagacctccacatggacagaatttcatgagtgttcaccttggtgttgctactttgcaacatagacttgaagattcagagaggagatgtggtaagagtttatttctggacagagaaaagctacaccattcatctagatctcattaatctgtattcattttgacatgcttttctgcagttgacgtttttatttattaagcgctttacaagatattcagtatcattatcgaagctataattattaatgatcaaagttagcagtacttgttttagctgtcatcttcatcatcaccatcaccatcaccatcgtcatcatcagggccacaacagcctcttcttttctcttaaatcttccagcaattcttcaactttgcctgtatatttatcatacaacataatcctagtatttagtaaatgcttggtctttgatttcttattttcaaatgcatgtctttagaaccagaatgtgtgtagctgttttctggcctgaatttgggctgagatgatgagaagtttagttgccactttcagctaagtggaagtgttttccccatttggactccgggtcattgacaaacgtcatcactgtttttagttgaaatgtgcttccatgtggctgttcatcagcacacccatatctagacgtgtgctagcctcagtgagagttgcagaatctgtgtattcatttcctttatctagaaatcctcattatggtacataaaagagctttctatcgcttttttacattatagtagttattcgttattattattattattattattattattattattattattactgagacaccgttttactctctctttgcccaggctggagtgaaatggcacgatcgcagctcactgcgacctccacctcttgggttcaagtggttcttctgcctcagcttcctgagtagctgggattacaggtgcacgccgccatgcccggctactttttgtatttttagtggagacagggtttcaccatgttggccaggctggtctcaaactcctgacctcaggtgatccacccaactcggcctcccaaagtgctggggtttcaagcatgagccaccgcgcctggctttgttattatagagttatatggatttatcattttaggtggagatttgagtttatgtctcctacagacagccgtagactttgtttcattttaagatcagtgttgcagacactgctgagtgtcttcaaatgtctgttctccctttattacctactaataaaatacctaattttcaacagcctgggaagagactatatttccctgcttgcctttgcagctagagtgatcctttgatgaagttctagtaaatgggacgttagcagaactgtcgtatctcagggcttccgtagggtttataactgatccactgagagataagttgagagcttgagagtcaacctttagaaaagttcgtaactatttgtcaaaattaagcttatgtctgttccaggtagtaattttaaaatgggcttatattttgtatgtcctttttaatttcctttttctagcaattctcaatgtttttttaaaatctcttctggaggagggtacccttcacaaagttatttgccaaaggtctgaggaaaaaaaaagcctttcaccatggttagttcgagaagcacagcaatacagtacttctgctacgagtgtatacaggctgaggatgggtgctttgtggcccttttcttttaccggctgactagaatgttgacgttaaagcagttagagttcgagcaggcaactccgaccccaagttggagctgtgtgttgaagatagaagagcaaatatgtggaaggaacctggatttctatttttttaaaaaatataataaatcatccagccccaaatgtcaggaacctgggtttctaatgatggttggctgtcacccccatttcccacactttaaatgagagaagtaaacatctgacttcctaaaaccaccgttgtcactcaaagccgaatctcatcctgactgaaatgtcactagtcctttttttttttttttttttttttttttttttttggtcatattttctccatttggagaggctggctgacccatcaatgggcagtgtgggggaatggagagacctgggattttggggacaacagtgaccatgaggggatctctacactcctacttggaaatggagtagcattctacacttaagtatctccctttataagctaggaatactaagaacctaagagtctccatgaggattagatgaggtaatgtttgtaaagaatctgagatatagtaagttgatcagcatatgttatttatcctcttcttccctctacaaagataactaagctgagatagcctaactcccccagctcagaaaatagcaagttatttgcaaaatcaaatgctgatgtaaccatttccattctgaactcagaaaatggagataaatctcttgcaaggcttttgattttagtttttagatacagaacctttaaaaaaaaagaaaaataaacgttttgccaaagtgtagtatatacaacagatgtgagggaaggacattgttttaagtgggaaacgtcagctctctcaacttctacacattcgactattccctactcctcagtgaccccaaagaccccagagaaactcagtatgaaaaatcactatggaagtgcaatagttattactttgtttggaattcactacaacactgtttctcaaaatataattcctgagtcacttggaagattacaaccaactgaattagaatctctggaaggcatcctaagagtctgcatttgtatgaagcttcccaggtggttctgctcagccctaagtttgaaaactactggcagaatagtagcagagttacttattctacattcgttttttaacccattgtaaaaatcatacatgtatgttcaagacaccggcagatcacaggaagggaaaaaaaatcacttatgcttccaccaccttaacctagaaacctttaggacttttcagtacttcctttctgtctttttcccctatacctaagtttttatttacaatatagttgtagccatatgattgttgctttcattgttgcttacatgtgttaaataattttgtctctgtataataacaacctctggcgatttttcctttctctctctctctttttttttttcttttgtttagacggagtcttgctctgtcacccaggctggagtttagtggcatgatcttggctcactgcaccctccgccttctgggatcaagtgattctcctgccttagcctcctgagtagctgggactataggtgtacatcaccacacctggctactttttgtatttttagtagagatggggtctcatctggtgatttttcaagtaaggtaatggaagcaagagaggtttacatacatggtgtacatatacctcggcagcctgtttccttcccttataactatctcaaaaaaacatattaagttatttttcagaattatgttttttcctgttgcttttgactgtaaagggcagacttaaatttagttaacatctgctctaacgttggatcatgtgtggagtccccagttttcaacattaaaaataaagtatttgttgaagtggggtttttttcttcttacagtatatgtagaaccattttcttgaaaatgtttcttagaaatttgttacttagaagatttgagccaatgatacattgccgagatttgtaagagtaagaccagcctacgctgagtattattttctcaaaggaatattatgaggcacatcccatcttcatatcagggaacaaactgtcacattttagtgaaatctgtgggttatgtgtgaccacacacagtgtcgtgtttgctccctttacagaaatctaagtaaaagaatcactttttcctagtatctggatgacttgatttcttactatcttgggccttcttggaaaccctgaaatgtagccttttcatcttaattcacaaagtgttcattctcacccttttccttcatgagaattttctgaagctattgtgaatctatggaagactcaaggtagtatctttttcacagcattcaaaaaaatgctgctggctccttggcttgtccggtgcatcctccgtgccagcccccgctgtcctagaaccatctaagctaactctccgatgagctctggcctctggacctcagcctatccaggccccttcatgacccagtcacagtgattctatctgtacctaccacagctaggtaggcggtatgggaagaccacaaacttgagagtcagacggatcgaacttcgtctttagccccccacttaggtgttatgtgactgtggtcgggttattggtaacatcttcttgctcagcttcctgacctgcagaatgggaataagaatacctagcacatagggttataatgaagatgaaactgcttaacgcatgtgaataacaacaatggctaacatgtatcagacgcttgtcttagtgtttattgttttatgcgtattgtcctgtttcatcctcatgcttaccctgagagaaaggtggtattattattcttattttgcaggtgaggcttaaagaggtcaattattaggttgaactgtatgaaatgactgtttttatagggaaaaacagtagccgatcatcaattccctaaggttccacgtaataatttgtccaggtctcatagcaaaaaggtggccggatgaggatttgaacccactgctctccaacccctaagcccgtgctttgtagaattaatcggagctctaaagtacttgaccctgggcctgacaccaatcaggagcttaaaacccattagtttcttttttgttttatttttgcccactattaaaatgtgccaaagtaataagatcaaacagggcccctgcgttttgacaaacatccgaattctgaatttcagcgtggaacagggcatggaaagcaaacacaatggggaaaattgccgtggccggtcccgacaatgtgtggattaaaaaaccacatgcatgcacagagacctgatgtgaatggtatttctgagtggaagctaagtaggagctgaaaatggccttttaaaatacagaacataaggatgcaattcacagagatggtctaaactgtaaacatgcagctgtggggtttgtgaggctcattgcttacataccgacagcatacaaattgtcaagtacttaaagttccattgttgctgaaagggcctccacccaatgtccttaaatggtccccccttttttttttttttcaaaccacaggatttacatctctcgtagcatctaatgaaataccagcaagaattgtgtgttggtgtaagaaataataatctttccaaatccttttgttttgttatcatttgctaatagagatctttgaaagaaaattcaaagattgaagtttgtattctcctaaactcctgcaaagaagtcctgtgcaaggatcgttcactagtgttctgcatcgttcttcttactcaactctcccgagaggcattgtggacgcctgtggggttggtttttggcacccatccctgaccccttcttctccaggaaactctgttcctacctgctcctcttgtggctaccttgggaggtgccatttttatcaaggttagtgtgtggttaagcaccttcccacaagctcaggggaaaaaaaggtcccctccccagattttttttagaactggaagtttccatttcctggcactggtgaaagctctaggacataaaacttgggagccgatggccttcaggctgcccataatgtgaagagaggtcatttcagacattcagataaagtctgtggctccagtatttttctaggtcttgctccctccctgaccttttcacagtttggtgacacaactcttccttgaattccataggttgacaaattcccctgagtttgggttagggttttgttacttgcaaggcaggcatcacagggctgctcctggccatgcatagctttggaatcacttctctgattctcatggctcgggaaggagaaagtgtcctgtgtgtggagatggcagggtggctggagttgagaggagagtcccttgaatgccacgcaacatttctctctgtaggtgtcctctgcacactgtccaaactccatttttaaccttgactgcatagtaccgtgtacattcattaagcatccctcgccataggagaatctgagttcctgggagcatttaacacagttcctggccttgagtaaaaacttcataagcacttgttgaattgaactgaatttgttgtctgtgtttaaaggacttgatggataaagggagatttaacagtttatagccagattggactcaaccatgatgatttctggtccatcttttagaatgtcttcacttctcttggcctttatttctccaagtggtgataatgagacctatccctaacggttaaagtgacatggtccatttaaagtgcttaaaccaattgccaggcacataataggtgctcaataaatacttcctttatttccctgttaggcctctcccaaccagagatcaaagatgattggccctgaagttatttttccccccaaatttgatagaaatcagtagagatgctaaaatataatacatttgacctgcattgatcaaggtaggctaactgctataacaactttacaattagtgccttaacataatataaaatgacttcttgttcatgtaacatccaaggtagctgtacctagttgcaatgctctcttccaagtagatatttagggacacgggctccttctatcttctgtcaccaccacctttatttttagcatccgcggtcttagcaacagtagaaggaaagaatggagataagacagtgggtatttaatcaccttagcccataagtgactcacgtcacttctgactaccatatccaatttttgcctctctttttttcttgggttccccccgacaaaaaaaaatatgacagaagtgtcacccatccagccagccagccatcaatccggtatccattcatccatccatccatctaggcatcccaggtgactcattcctgtgaccttgggagacagtctttcttcctagaggttgtttgccccaaccccctgttacattcttgaaccatatgtttcccattgtttgcacttcccctagtcacctggtgctttaatttttgcctgtaaccttctgaaactttccttaaatgttcggctttgacctgtcattcactaagtctttcaccatccttcactcatcttacctccttcttctgtggcatttcataaatttaatgattgtaattgtgattacaacataattgtttatgtctaccccaggctttgcaacagggaactatatcattattttgcagacacaacaaattctgcaagcatgtatctttggaataaaggagagagggttggacacaaatgtgattacaacatatgcttctctgggcatagctttgccccattgcacgaatatagaaaatttggcaggctgaaaataagcggaaagatcctcaagctgttccttccaccccctgggatgctgattaagatttcagattttatttattctacgggtatttgttgaatatttatttcttacgataccacgcactgctttaggcactgggaatatagcaggatatacaaaacagaaaaatcatggccctcatggattattggttgtgagtaataggaacctttcaatctaacttaggaaaaaaggttagggagccaaggaggaagagtgggtgtgatgatgcatcaggataccagagaatcccgtggaatcccacagtgacacagccaagccttgggaggggtgacactagcgatagagacagaaacccacacaggagtccttttctctgtctctcatctctgcttttctctgtacatctggttcaattattctcttgccacgaatcagctatttgtattcctctgtgcacgtcgcagaagatcaggaatttgcacattatagtcacaaccatacctagaaccaaattgcctaacactgaatcccaaatccaaattcctgggagatagaattcaattcttctcttgccacaaatcagctgtttatactcctctttgcacgttgcagaagatcaggaatttgcacattatagccacaaccatacccagaaccagattgtctaacactgaatctcgaatccaaattcctggatttggatggactcaatctggacccagtatctacatttggtccagtcatctgtatccggcatcggggtcttgttgaaaaaccatggcttagccgggtacagtggctcatacctgtaatcccagccacttgggaggctgaagtgggaggatcgcttgaagccaggagtttgagaccagcccgggcaacacagggaggcaacatctctaaaagaattttttaaggaataaaaaggaaaagcatggcttttattctaagagcaaaggcattttgtatatttggcaggtatcccaacagatgcatcacccagtctcttaaattaagataataatttatttggcaagtgaattcttctagtgtagttagatagtgatgaaaagatttttatacctccaaacacacacacgcacatgcacacccaccaggctcttctttacttctcactcatagatttgaaaacaactattatattatagaagttttttggtatagctgccaggggtcattgtttccatcccctgtgtggagataagaaaatcgagatccagtggagtgtggggtgctgagagaacaagtctatgttttcttgagacaaagtcttgatctgttgcccaggctcgagtgcagtggcagcatcttggctcactgcaacttctgcctcccgtgttcaagtgattctcctgtctcagcctcctagggagctgggattacaggtgtgcaccactatgcccagctaatttttatattttcagtagagatggggttttgccgtgttggccaggctggtcttgaattcttgacctcaggtgatccatccactttggcctcccaaagcgctgggattacaggcatgagcctaactatcctcattaagccatctgctttctgcagtcattttcatggcgatgtgttataacaggacagaccttgtactttggaatcaaacattctcaactctgctatctgctctttgtggggccctgaacaaaaatctttactctctttgagccttcgcttcctcattggtcaagacttttctcactgcattatatttgagtgagacccgtatcaatggattgaaattctcagaaacccaagaccaggaatagcccagtgacaggaatttagaccatgccaagtgtgaaccatggcttgcgggggctcctgtctcacgctggatgctcctgcctggctgcctctggtctccagcagaagacctgtcgtgcttgagtgacaaagcagattgcttcctcccacctctgtgggttaggacccctttttctatcctagtttcactctgatgggcgagttcactcacagtgaaaccgtagcaaaacctcaaggtttggcttaactgcaaaggggtggttgatatcagattcatacgccagaaccagaagaccactcgtgagaaattctgtaagcacaggagtgtggtttatgtcaaaatcaatctgatggagtgaagccattccttgccaagcgaaaatacagcatcatcaactacatccttgagcctagaacctcttcactcagcaccagctagtgggtaaagcccgggagaggttgtaacaaatctgattccctgacactcacctgaaacaagattcagcaaaattaaaagcaatattaatatatgtcgccttgggaaacagaggcagaggagaacaggaaagagtcagatggactttgatttgagacccgtttctgcttcttcccagggtgtgacctcagcggagttccagagcatccatctcctttgtaagacacagataataccaactgcatggatttgttatgagagttacatcaggggagggtcatgaggtcaccttcccatggccaggagaagcaggtactcaggaatggctacttctctggccactttatagacctatggagatgttgaaagtagcccaaaggaactgtgtgcctcgcatcttggtccatcttcatgggttgatcattgtggttcatatcactgtttcatgaaacacagcccgccagaaagtcgcgagtgttttgatttcatcctatacctatagttacaggccatttaagatccacagtctgctcttttagcttctgccagcacatttggacatctgtgcagttcccagggcaggtgaagagttgttcatgtgatgcaaacttttgagaagggacgtgtagggaagatgggagggaggtgatatttattgagtattttctttttgctttcagctttataccttgtgtgtgcttacagaggtcatgaattgtccgctgttgtatgtgtaatccgtggcagatgtgcataataagttcaggaggggctcggttttgggaggccggggatactagaagataaccctaaaatgtggaaatctacatcagagagtggtgtgagtggttcccaaaatgcctacctggcactcctaccaaagacacagcagagaacttggggcctcttgtttcagccattttcatcttcactgtaaatctagacaagataatgaatgaagaacctgacacatttaaggaactccatagttgggagcccagtgtgagtcattatggcgagtccctaacactgcggttcccctacttgagggcgcaggtaggggcactttgctgcctcctttgacaataagcattgccattgccatgtgatttgctttgcctaatgaaatgtgagtgacacttccagatggaaatattaagagccagtgtgtggttcaccctgaccccttcctatgccccagcaattaaggaagcaatgttcagatgaaacccatgtcttcctcctgggtccctgagtgaccacagtcaacagagcttccctgttggccattactaatgtcaagaacaaagctgtgtaaagtcactaagattttggaggtatcggctgttgcagtagaacctagcctatctcacctgacacaaacgttttctttctcacaaaacctcacaccagtgttgttttattcatctgcttatgcacgcgtatggctgcaacatccttccaaaatgcattacaggctctaatgcacgataagacagttaggttcgaaggaaaacaaagacaattgcacggcacagagggaatatactgctacggtaaaccgatcactaacacccggccctgaatttgcttcaaagttttcactaaggcacaaagggagccgtgtggagctccggagttcccatctgaggtcttgtctaactccttggcaacttttatgtatttgtataggagactcttttgccagatggttgaaatgttcatcctcctattttgttttaatgcaaactgacatttcttcatcttcctgcggtgggtttcttttatgaggtcgtgctttgcattttcatagaaagaatttctgactcccgatcggagcccacccttgtagtttctgtgggggctgttttggttaaccactcgcatcagttttaagtctccacaggcagaaccagaccatcgtgaacttcttgatttacatggtggtggagagtggctgagaaaccagggagaaacaggaaggagctgattgaggagaccaaaggagggtggggccgcagctctcaggcactcttggtgttcagaaggccagcttgaagaaagatgtgcatatttgcaaatgcatttcttgttcctagtgaagaggtgaggaaggacactgactgtgctagagctgtacaaagagaagtagaactctaaatagagaaaatatgtaaagatcaataaatcacaccaaaaataagtcataagaacaacaaataataccaggaataaataatgtaaaatataaataattcctaaaatggtgataacagcttatgacaagtaatttcttttttttgagatggagtctcgctctgttgcccagggtagagtgcagtggtacagtctcggctcactgcaacctctgcaacccaggttcagtcgattctcctgcctcctgagtagctgggactacaggtgcatgccaccacgcccggctactttttgtattttcagtaaagatggggtttcaccatattggtcagactggtcttggactcctggcctcgtgatgcacccgcatcggcctcccaaagtgctgggattacaggcatgagccaccgcacctggaggacaagtaatttctaagtattatttcttttaatcctcacagtgactccttgttagggtttgctgcattttatacaaagaagaaaggagtctgtggaagtgacataaagtaggacatgtattcatttactgattcaacctttcatttgtacatatatgtatattttacagacacggtcaccctgtctaggtattaacagttattacaaagatgatataattttgcaatcaaaatacagacacagttgtctgtctcccaggctggagtgcagtggcacaattatagctcaccacagccttgaactactaggcttaagcaatcctcccgcctcagcctcccaaagtgctgggattacaggcatgagtcgccacactcaattatacacttaaatatacatatatatatacaatatacatatgtaaatatatctgcatatacatgtttagggacaaaaacacgggagtaccatttctgtctttgtctctctctctctttctctcacttgactctgttgggagctatattagttgttttctctttccaaaccaccttctggaggtctcttagattttcccaatgatgaaggagctactgtctaggttattacagtagtaatagtggccaagaaaatgatatgaggttgaagtggacagatgatgcttttcactcttctgggaggttcccactgggtggtctgctttgctgagctttgaaaaagagcttttcttcttcccagttcactgggccgatgtgggcacagcctcaggttttggtttttttctcctttgctccttcaccacctagaaaactaatttcctataaagaaaatttctctggaaatgcaactttctcaataggttgagtctactcaaagactgacaggtaaaagtggtccacatagaaaaacctgtttctctattttgttttcaaaattatatcatctttataataactgttagtacctagaaaaatgcatacattttattccttaccaaaaccagttaccctatagtcaaaaggcattcagaagtattagcagaaatgtagtcagtagccaggcatagtggctcacacctgtaatcccagcacttgcggaagctgagactggaggatcacttgaggccaggagttcaagtccagcctgggcaacacagtgagacctcatcactacaaaaaataaaaacaaaaaaattagccaggcttggtggtacatgcctgtagtcccagctactcacctgtagtcccagctacttgggaggctgaggcaggaggatcgcttgcatccaggaggttgaggctgcagtgagccatgactgtggcactgcacttcaacgtgggcaacagtgtgagaccccatctccaaaaaaaagagcagtatagtcagtaagaaagaaaacaaactaacagtcaatattgtggctgctctcaatgttctttaaacggatcacattgccacttttttctctttgtaaaaatgaaaattcccagcacatattacatgctcaataaatgttaattgagcattttctgtctgagaagttcaggcaacttttcatccttccaattgttaagttctagtttcttattacaaattattactgttattattttaatttgattgatatgcaaaagtcaaatttgtgcaaagaaaatgcaagctttgagatgagaaagcgtgtcttctggtatgtttcttgatacattttgagggtattgagctctaatttacttaagatgaccttttgaaaatagattaacttatcaaaacttgtggtggaagcaagactttgtcagtacagtactatccaaattctaaagtaatgaatgcttctctccctctggagttagagacctgactctggggtgtggataaagaatttgtgtcctggccaggtgcagtggctcatgcctgtaattccaacactttgggaggccaaggtgggaaaatcactagagtccaggagtttgagacctgcttgggcaacatagggagactctgtctctacaaaaaataaaaagaaattagccaggcatggtgctgcatgcctgtagtcctagctatgtaggaggctaaggcaggaggactgcttcacgctgggaggtgaaggatgcagtgaactgtgattgtgccactgcgctccagcctgggtgacagagtgagaccctgtcccaaaacaaaataaaacaaagagtttatgtgttcagtaagagctgcagtcacatctctagtacagactctgcagagcactaggaagccccgtgtctgaatgggatatggtgagagaggcagcctagggaatggagatacctgggggtccccatctgctcctgatggacagctcagatgaccccaagaccctctaccaggcactgatggagtaaggatggagatgggaattgcattttagaggtaagaagccaagtggcatgatgaggagagtattcatgaaatttatggaacagtctgggggaaatgccatgatttcaagcccttcacctaaatcttcaaaagtggcatggatcagtgcctctcttccccagccaggagcgtgtgaagcatggggacctccggaatgttctcagaaaatgcttggttcttcctgtgttgagcagggaagaagctgaagctagcatgggcaggggagaagaaagccagttacatatcaaagaatgcttatctccgtagacaccactgtgtttgagagtcacattgggtggtttgtaggcagcttttcattttcacagccagtcaggcaaggcttggaataacttgtctaagaatcctcatcttaaccctgtgctagaacaacaagcttggaaggagccagccaacaggagaaagccagagcaagactctgtgctggacaagaagtcctgagcactggggagttgacttcatattggaggcagagaagaattacctgccgatggctgttggcccatggcaacaccctagatcgttgcatttgtggtcctgctgaaagaggagacttaagttatagagttattggtacttgcaacactttctctggaatttggccatttctctgctcttttagtttagtacgttctcttggttgcgaggaaatcactgaagccacctcacgtaatgtgagcatgtatgctcaaggggaccaggaaatgctgaaagttcaggcctcggaaaggacaggatgtggaaggatgttctggactcaaggaggcctagggacccttggcaggaggcattcatgggtctgtagtccaaggctccactaccatctccttggcttctctcttccattctagcttcttctgcttattcatcacttttgcttcctatgaaattggtgcatcctggtcttggcctctttgagccctctgtatagtgtgagctcatctggtactcttgactctctcaggctcctgaaggagaaccatcagatagaagcatctcatctccccaggccatgccactgggcctcagccaggcttgaactagctaggctcagtccacggggtggccttcaagcagcctagacttggatccctaagcacagcctgtggatgggacgttttaaggtaaagggaggacgcagagcattgcagcccgttggttgttttctccagcacagccatgcaaaatccatgtagcggcaggaattttgcagctggagttgctcccctgagactctgatcagataaagacagggtttgctgaacaccgtaggtctggccctgagccgtgggcagcctgatgagcacaggtgaatggtgcaagggataacctcacagtcatcagcaagtcttatctgggccgctgcaaatatgacggagtcagaaaaatgacaacataaagaaatgcgatgttttctatgggggtttctttttgaaactaaaagaggttttctagactcactccatggagaccactttactttccatttttctcagatgataacatctgcaggggggctccttctgtgggtacatcatttgtcaaatatgtggtccatattgagaaccgcataatacttattaattaccacagttgctacttaccgtgggctgctaagactgctttagatatactgcagatattcaaagagaattcatcgtccacccaacggcaaagtccatagaagcccaggatgcattctgaccctcatcctttaaagcttactgaacatattgatcacctcttttccaaaggatacttcctattggagtgtacttttaaaatctattttttttgtcttaatgtttagtgtaatgagggagtataggatgaactcaatgtaccttgaacatagctgttgtcaggaatgaagccaatttcattttgcctgaattagggccctttggtgtcttttctgtatgcagttaatacagttcgtgtgctgtaccaagggtgcgaatgtgacttttcatcaggaaggccgcatatggtgggcacagggcctagctctgccgttttatagctgcataactggtttcttgaccttttatgagtctctactcatgttttatatggagacattagtcatctcacaagatttttgtaatgattagaatatttgtaaagttcctggcaaaggtttgattataaattagcgtcatcatgaacgttcaaggtggggaccttttttttttttttttgaggcagagtctagctctgtcgcccaggctggaatgcagtggcatgatctcggctcactgcaacctcctcctcctgggttcaagcgattcttctgcctcagcctcccgagtagctgggactacaggcacacgccaccacgcctggctaatttttgtatttttaatacagacagggtttctccatattggtcagggtggtctcgaactcctgacctcatgatctgcccgcctcaaagtcccaacgtgctgggattacaggcatgagccaccacgccctgctaaggtggcaatctttatacataaaaaacaggaatgacttcttcgaattggtgcactagagaaatgttttccagtcgcctaagcgtttaagcatggtaaacagattaccatattagttgcccagaccttgcaaaacttcatagtgtttgtttgtttcccttgggaggctgttctgagaaggaaccttttcattcctcggagttctgatgtgttcattggcccctgttgtcatgctggatatgggggcggttcaaggggggcttgggtgcctgagaaaaagagtgaaaaacccaactgcgaaaacccaagagaaaccgaaagagtgaacactggaaaaaaaaaaaagggggggccggcgagcttcaggacctaagcggttaaggaactggctttgacaggaagtgggcaggaggctgttttcagtatgctcatgggaacccagctggaaagtgctgtggtgagtgtgtgtggaaaaaaggggctttaatcaagctataaatatctgtttctttgaagttttatgaccaacaattaatgttactggaaggcccataaaaagggctgtttcttgacttggtgggtctgagtgggccagggtcgggttaagatgctagcctcgtggggtgccatcctgacagattctactgtgtgcgtgtgtgtgtgtgtgtgtgtgtgtgtgtgtgtgtgtgtgatataatgtgttgcattggtgtctaaagccatgctcagtatatagttatatatttcattcattcatccgttcattcagttatctcacgtttctggagggccctctatgtgcaatacctagtgatacagcagtgaacaaaggaaatccctgccctcagggagctttcattctacttggggaaagagacgtgaaagaaatcaagacatgcaagcaaggataagtgctgtaaagataattcattcctgtttagagggctgaggacaggaagacgatgctgtatggctctagacagggttctgtgatgagtggcctgtggacagattcctgtccgaagaggtgcagggtgcaagggaggaggggacggcaagtatcaaggtcccgagtgaggcacatgctcggcggggcccaggcatgccaccaaggccaggaggagagactgaggaggcttggccatgccctgccttgttggtttttagaaagactctgttttggttattttgtttttctttttttgagacatctggagtgcagcggcatgatctcagctcactgcaacctttgcctcctgggttcaaacaattgtcctgcctcagcctcccaagaagttgggactacaggcattcatgccaccgcacccagctcaaatttttgtattttttgtagataccatgttggccagcctggtctcaacctcctgacctcaggtgatccacccacatcggcctcccaaagtactgggattataggcacaagccaccgctccaggcctagaaagactggattttaccctgattgagcgagggaggctctcgaggttttatttggttctgcccagtgaccagccaccataaccacatccttcccccagactttttcctcttcctataaaacaaaacaaacaatgtgaacaacaaaagcaaaaacaaaaaactaagtagtagttggggcatttttattttaatgctgcttttttttttctcaccttttgctatatgctgatcccagtgcatgaaatttttttgtaatctcattcctgtgttgaagctctttcactgctttcgtgagcacagatgaatttgaaggctgccaggcagtagcaacatataccagcttccccactgggtgttcattctacccaatttttgttcatgtggacttcaggaatctgggatttatgatcttcggatttggctcttggcttgaggcttagcctgtgcagtcatcttggagagagggtttactaagcaaagaacaccccagaacaatctgggggaactgtgccctttgcaagagagcagttttaaagtaccctcgggcaatttagaagctcctactgactcaaggatattcttacctcttcgttaaagcagctcgcctaaggactttgctagataaaagttggttttctcaagagggtttctgcacacacccgaccgcatctttttcttttcttttctttgttttttttttttttttttttgagacggagtctagctctgtcaccaggctggagagcagtggtattatctgggctcactgcaacctccacttcctgggttcaagtgattctcctgcctcagcctcctgagtagctgggaccacaggtgcatgccaccacgcccagctaatttttgtatttttagtagagacggagtttcaccatgttggccaagatggtctcgatctcttgacctcgtgatcttttctcgcctcggcctcccaaagtgctgggattacaggtgtgagccaccgcaccgggcctcacgtttttcttttaaagaaatgtgtaattcagatcagtcttgctttcaggtagtctgaattaggggagtttgcctgtgtgcaagagaaggcttcctacttcattttcttgtgtgcagggagccatttatgactaataggattcattacatgtgtgtttagcccaccgattattaaggctttaacaatattaaaacctaaagagataacagaggggaagcctttgggagctaggaatcaatcgtgctgggtggcttgaaaacagggcagtaaaatggcagccgcctagcctgtggtctttaatattaataaagccagaggcgatatcacttagttgttccaacatgattggttcctcatggatgtgcacccttgctcatcaccatctcaccaccaggctgaccctatacatcttccaggagcccagctctttcccctggaaatggttctctgagtttcagctgcagttcagggaaaaggccagcagccacgttccttgttttgtgtaattggtctttagcctgatctgattcatctggcgaaacccctttttccagtaaaagtcgttggcgaggagtgaattgtgatggaaacagagacagatgtatgtacctttcatggacataatttccccaagactgaacacaaaaatgagggtttttggagatctctctggaattaatgtaaacgttgttgaaaacatattattctatggctccttcataaaccctaggccatcccgaggctgtctcactcaggcccctcagccctcataaccccccagctccataggagtggagtttggatttcaactagataaggcccattttcatggatggacatgtgagttttcatctataatatagaatgctattttctagttaggttggagcaaaagtaatcgcggttttcaccattatattcaatagcaaaaaccgcaattacttttgcaccactactttttacctagcagttcaacagctgtaaagaaagatgctgagctgttggttacgtaactgtggtacagccatttcatagacaagtctacatcaatgaaaagaatgacacttctaaaggaaaaaaaatgggcaaaaattatgtgtttacatctatcagaaaaacaaaacaaatgtcacggtgtggttgggaggaggtggggagagaggcagattttggaggcgaaagatacacagaaacactaaatacctgtctattaatactgacagtagttgcgtttaggggatgagactctaaatttgtttatttaaattttctcattttaaaaaatgagtcctttcaattatgagatcaaaaagaaatgttcagtggcttattgtgacccaacatttttctgtttgatttagatagagcttttatttgcctaaaaattgtgcttgcaatatatatgatgatttttttttcttttattaaatgaaaaagagtcatttaacagtcacagtggctcagccaccacccgcagcaggcagtgggcccacttcaccttcccagcaggcctccagtgcccggtgcagggtggcccattggcacccacaacaaacatcacgacattacttttaccgcacacttcctgtcgaggcacaggcagtgcttcagcctttttggtaacttgaatgaacatcaaaaggataatcagatattagttaaacttgttcctcttctccaatcattgatacttttctctcttgcttcccctccccctgcccttcgacacagagtgacaggcctgaagtaaaaagggaaaaggggaaccgagtgactcagcccagagtgggcctcaccgcagcttcctggccactttctcgctctctccttccaagagagaaaggggaggaagcccagagccttctatcacttagtaccgtgtcatataccacttccacaaatgctagggaatgaacgaatacatgtatgaatgaatgaatgtccatggggtcactcagaagtagtggcataatttagccagataaagtgcccacctagcactcatcccacctcctcactcctctatcctgtgaatgcagaaatacaattcctcatttacaaacaactgtgcatgtagggttgcttgcaaaagttcgtcgtgtgccgatatttcattaccacttttgccagcgctctcgtctgcatttcctgaggtttttcttttttttttttttttctttttttctttgatacggggtctcgctctgtctcccaggctggagtgcaatggcacgatctcggctcgctgcaaactccaactggttcaagcaattcccctgccttagcctcccaggtagttgggattacaggcgcccgccaccatgtccagctaatttttttgtatttttagtggagactgggtttcaccatgttggccaaactggtccagaactcctgacctcaggcagtctgcccacctcggcctcccaaagtgctgggatgacgggtgtgagccaccgcaccaggccatttcctcagttttaaaaagcaaataagaaacaacaacaaactgcatcagagtaaccgtttcaaaaacccatctcaggtctgttttttcttttttttttaagttagcattttctagaagttttggtataaaatatgtacaaggatacatatataaacttagtgaccatctgaagataaacctggaatgaggaataacaacctctcatttaaaggagttttaaagagacaagagggaggaaacgagaagagaatgacagtgtttctttcattaaaaggagcccaatatttattgagccaacaggtttacactgtgtctaccccagagtgtcatcagcccaaaccagatcagcgtcgtgggcgatttttttcactttactgctgaggggatttgccaatcgcctggtcagcttctgaattcttcgggcacacaggaggggcgacatggttctggcttatttctaagtccctttgaggtgatttctggtccacaaattgaggcaaaataatcctcacaatttcttggatattctctgccccagccccgttctattgcaaaggaggcttctctaaaaggcttcccaatgccttagaatctacttaagggtatttttgctggagaaagagctgctgtctttgtccacctgtcgttttcctttctaccccaacagggctttctccctctggctgttttatttagcgggagaagacagaagagatggaaaaatggaccctgcatttatagctgttccttcaaggagctcaaactgctttcaggcatttccttattacctcattaatcctcataatggtcccttggcagaattattcttattttcagaatggagaaattgaggcacggacaaaataaatggcaggtggaaggtcagagagccaggcagcagaagaggtgggggcagcaggatggcttctggtttctgccctggtccatcagtcagaatgtcctcttcagatgaggagatgcagggtgaggcgcgggggagctgacattgcataaataataaaacaaatggagccacatttagttatcactcatctagcggaagtcgatcttcttgggacatgagtaggctctaacctggcaggtttttcaacatggaaccattatttgtcacatgtgttctgtgtgccagggactgagttcttctcaacggagtttacatgtgagaggagcaagggacaaacctcacaaataggaatacagacctcagaaagccgacttcacccttgcatactcctccaggttgccctcgcctcccgcctggatcactgctcaattctctctctctcttttttttttttttttttttttaagacagagtcttgctctgttgtttaggcatgatctagctcactgcaacctctgcctcccaggttcaagtgattttcccacctcagcctccctagtagctgggactacaggcatgcgctgccacacccggataattttttttttttttttttttttggtatttttggtaaagatggggtttcaccatgttgtcaaggctggtctaaaactcctgacctcaactgatccgcctgcctcggtctcccaaagtgctgggattacaggcatgagccacagagcctgaccacagtcctttcttttaagggcctcctggcacccagccatgttgggaccctttcagttctttctccacggagaaccagaatctcctttgaaaatatgttagatcacctctttctcctgctccgaactttctgaaggcgtcccctgttactcggagtgcaagccatgctctcgagctggccatggcatcctgcgtcctctcccttcccccattggctctgttcttcctgccagtgctcttccccctgctcactgggttccagctgtgcgggcctccctgctgttcaatggaatgagacccatgcccctcctggttatcccactcagagtgcccttcaacagctacagggctggcccatcctttctctgttaccttcggaggaagccttctctagataccatctttaaaacagcaatcttccttctccatccccagcagcacctctgacccccttcacctgctttatttttctccatattatcattgccatcaatccaagcacaatttccagttacttacccattttgctttctccccgctctttgagaatgctggctccaacagggcaggtatttcacctgttttgtttatgcctgcatccccatcactaggaacctcataggtgcttagcaaatttttgatcttaatacagaaattgactctcacagaataagaagaaggagcttgaagccgaggtttgtgcccagaagatctcactagattctttatactctggggagaagaaaggatcagggtcgggtggggacatctgtgggcatattggggagggggccaggaagaagccaggaagggggcatgctgtcattcgtgggttttgcaactttctgtggcatagaaggcatagaaggatctcttcatttaaaaggtcaggttggattttttttttttaacttcaacaccagttaacttacttgcttccatcataccctgtaggtactcgttatggacaggaatacatgtagggtgaaggctgctctgggtcagtggattcacagagaagtcagaattctcttttataaagagcctgcttttctcaataattgcataatgacgtctttgattcccaggccctcatgcctagctgtttccttaggcatttattcaagatccgagatgccattcgcaatccagcaggatgcatatttgtatctggctccaaaactttttttttttttttttggcccacatcactgcagcccatggcagaagagtctagcaattagcaggaactgaaagtgataatttattgcaaccaacgctgtgatctaatagtcacacattacaaaagcaaaatccatattttgttcgcagtggcaccgcagcgctatcatatgctccacatgctttctaatgtcttttgtttgtattaggaaaaaacataaccctctcctactgagaaccagagagagcccctcaggttctgagaatgacgacattcaacatcgtactccaaagggggttaggtttgtgtgctaggggtgaacgctgtgcaatttaattctgtttccaaaagatctttggaggataaaggatactttctgtcttttatttagggaaggcgatcatgttggcacagggcataagagagtagcggggctgagagtgggaactgaggagattcaagccttttgcccgtcgatcgcagttcagatctgttgattttgaccattgcatcttgcctcacatctgaacttcaggtgaagtttcaaaccaccaggcaacatgcattacaggcaaaatgataagtcaggtcctgccgggtgactaaggcagtgtggcaatgcttcaagcctttaaaaccatatcccagtggccccaaagcattaatatgtctggaacattgcctgtccaatatctagagaggcgcctgcagaatttgattcctaggtacatcaagtttttgagctggaagaaacttgagacgctctttagtccagcaaatttcaaacctgtctgctcatcagaatcacctgggagcttgaaaacacacagatgcctgggcctcaccatccagagagacattcatttgattgcagattgaatccagaagctctaagcagaggcacagtcacatttggggactccttttatttagtagaggaggaaactgagtctcagtgtctgagacagacagtggggattgaacacagacacctgactcccagtgggtggtattttctcctagagtgcatttctgcttcttaaccagcagaagaaagcccattaactaacccctcaggggtcaccatgggcaaaggagtgcatattaagaactgtctggaaagaaaagaaggtcattggaatcttcttcaccccttccctggtactgatggttgcatttcaatggatttctccaaaagcaattatcacagtgttcctgtgtgttgagcaaacttcccttgtaatcaccttagcgttttcttttgttaaagagtaagaagaatggtttcatagtgaatttttcctaaaatgtgcagggtgtagaagaaggaattgcacacaatacatgtctactaggcaggtcaacataaatgagtagaggcaggtaataacccagatacactttgttggaaagtggaatgcatagaaatggtcttcatttctgcaaagaaaaatgtacattctcctttttttccttgcaatatgttgccttctctgtatatcttttaaaatttctacttctgatagagtaaagggtatagttttgtccgttttgtgttgctataacaaaatacctgagactgggtaattcataaagaaaagaagtttgtttgattcacagttctcatgcctggaaagttcaagattaagcatctggggagggcctcaggctgctttcactcctggcagaaggcaaagagaagccagtgtgtgcagagatcacatgggcagagaggaagcaagagagaagggaagtgccaggctcttttaaacaaccagctcccgtgggaaatcacagagggagaactcactcactaccatgaggatggcatgaagcccttcatgagggatccgtccccatgacccaaacacctcccggtaggctccatctcctgacatcttcacacaagagatcaaatgtcaacatgagatttggtggggacaggcaaaccagatccaaaccatagtgactatgatatatctttcacatttctctttacaaaaagaaaaacaatgtaaggtcccgtgacaattagccttactgccggggagaccataaggagtggtggagactgtggtaaactgcagcgcgcacactctgttaacagaggaggtcactttccattctagctgactgttgtcatatgaggatacacaactatgctggccagtttctttaattttttttctcttctaacagaatctagaaatgtagattgtgtgtgcgtgtgtgtgtgtgtgtttgtgagagagagagagagagagagagagaaatctttaggagttttaaatattggcaactaattcaatttatttctgtttttaacatattgcaccaaatacatgggtatgggccgaaaataacatgaactttttgcagtgtacaaatctctaatttgagacttctaatgaaaagatatttggttacagtatgagagacaagggactaaaataaggttgtggatcattcagggttaaatcagagcaacagcatgagtaggagatatatagaaacagatttattgcaaggagttggcttatgcaatagtagggttgcctaggcaagtctgaaatccatacagtgggcagtcgagagaggcagacaggaactcttggcatatgctaaagctgctatccacaggcagaatttcttcttctccaggaaaagaaacagttcttctcttaaaatcttccaaatgattgactccgtcacactcagaccatctaagattatctcccttcctaaaaggcagctgaataagggcttcaatcacatctacaaaatactgtcccagcaacaccttgattcatgtttgactggataactggaaactatagcctagccagggtggcaaacaaaatggaccatcccagggtagatgttaaaaaaaagatacccaccaaagataaataagatcaagattagaatgtcttcttttgataggatgtctgatttttctgaatttttgttcctaaaacataagattatttttaaaagcctgagaaacgagacattagtgatccgattcagaaaagaagccctgggtttaagccaatacgagatgggtttgtatctttaagtggcctttattaccacagtaataaacagcaaacgggcccaaatcttacaggcttgtgttggctttgaccaatgaagtagaacaagacctctgaataccccgttagttccaggctgtgctttgatggctctgcacagacagctcttttcctatacaagtcaccagcctcacccgtgtctcttaacaaatgttgttgacaggccgcgttgcaatttttctgcatgttctgacagtttaattcagtacctcctagctaagcactcagcctaagggggtgcttcagcaccttggcgtcaccaggctgcaattaaaataattcagggactggggctgggcttgcagaaataggccttcttccctttggaacatacaatgcattttccagtctccccgtggagcacacgagatccttttagagcagagggcagtggaatgtattaacaagatgtccactggcaagaactagctccatttgtatgttgcacccaacggggttttctccataggggttaggcgtaacgtctttggtaaacttggcacctgtagaaaggtcttgtggtgggcaggggggtgtgaatgggggaatgagaactagggaacccaggacccaggacccaggacgagagttcagcaaagaccatttacagaagctatccttccaaaacggccactcagaaatggtgtcttttattttgcattctgtacaggaaggacaaatggagaaaagtctccagaaattggcctcgtttgaaaggacctcatgcaaagagagatctttggagacatttcagaaaggtttttattcaaacatattcgcagcttgtatgacagtggaatgttttgaaatgagcttgattctgtttacccatccttcttaatccaacaactctgctggtctctctgctgacacaagatcgttcgcaggttatagaaggatttaacacgtcaggtaaggtggaatttggtaaattccccaaatttacaaatagatgaaagttgggtaaattccccaaaattacttgatgacaaagatcatttgggagagattctttcaaaaatgcctactccctattcccatatcccagcctaagggaatgagtttaagtgggtctacagtgggtcctgggaatttgcttcttatctagcatccctggtgaatcttttcattcaagccaatgcaggaagtagtcctctgaaatacatgtccacagaacacgccgtgctttccagaagacgcaacagacagaaactttccaaagggaattacctgggatcatttctcatcctctctctctttctctgtattacttagccttaaaaaaaaaaaaaaaaggactaatacttcctgctttcacatctactttccagatagttttttctagaggtaggaggtacataagagaaacgtgttttatggctgtggttttcaagaagtacagcgttttggagagagtggaaggctttcatgcatgaaacactcagggaggtaggagatccatgagatccaagctaaacaattctggaagagttacctgaagttgacacttaattcaagctgcatcatcttcctcctcccagcagatgaagaccaaaggtggagggtggtgggggtggggggcagggagtaggggggagggggggagggggtgtggggagggtggggcgggggtgggcaggttcagggactgaggccggaagcaaaacaatgtactggagtgcttatagtttttgaggaatcagtgagaaatgtcatctgaatgtctcttctcaatctttctgaaagataacttgcctataaacataaaattaaaagcttgctgtctgcttagttcaggtattgggtcagcgtcttgtgactatggacaagaggtgtttgactctaggactcagctacctcatctgttaaatgggcaaactgggagggtgtttatctgcatgcaacatctccttccatttgaaaacttttatgaatgtatggaatattattgagctggtgtgtgctaatacactgctaggagccattggagatttgaaatgtgagagaatgcctgctgtctgtcgcatttaccaaacatcatgcttttcaagattgttaaaagttgctgaaacccttctttgaaggaaatcatactttgaagctcaatatatagcaaacgggtagaagagttgctaagagtttgaaaatgatctcattaaacaagaaacatatatacagtgcctacctaggaaagagccaggcatataatagccactgcataaagatgtcaagtcttttggacacaatcctaatatctcggaggttctgaagctaaagggtacatgtttaaattttatttgtttcattaaacacctaaagactctttctagctcactcctgccaaaggcagaacttgagagtggcattcttttctggtctttgaagacgacaggtgaagggcagaatgtcctgtgtacttgggcacgcacatgcaaccctggctggtggctcctcctctctgtcctcttcctccctctcttccttctcttccttttcttcctcatcctccttttcctcctcctcttctcctttctcctcatcctcttcttccctcttctttgtgtccttgtttccatttgcttcttgctttgggcaagttctcaccataaccctctggcaaaggcaaatattcacctaagtggttaagtctctgggcatatttgttgatctctgctgagtctctcagcccgttttcatccctcctctgcctctccctagccattagccaaggccttgacctattgactgcagtgttgccgaagcagctggactccgtgtttgaaaggttttctgaagaggcatctattaatttatgtatttaatttctgtatgaagtgactgttctcctcccagcacaggtattaaagtacctttaggggaatccagcagctgaaatcctcagtaaggaaaaatgcttagagtgtcacaaagcaaacgcattagtgggaaatgtttaggggctcaagcacaaccacaaggattcactccttccttggattttgtgcctcttcccctgttcctgaggcccccactgggaacccttagctggagaacacccgtttcattatggaacatggagaaaagggtgattgtcagctccaatttattccatactatctgattcaatctgtagtttgactttgctaaaggaattaatttttaagatcttaacaaatccagtaacatttaaaatgacctatccagtccatgcatattagctattcataaagggttttaaacattattattaatcctagatatgttacttaaactattaagtccgttcaaggcattcagtttctgagtcctcaaggatggtaaggagagctgcaaatgggctcccttctcaagcaaaggcatcttatgccatcatgcacgtttctacacatctgcctgtagatacactctgtaggacaaaccaggtggctctgtccttcaggcaaagagctccttaattgaaaatgatgtgtgaaatttcaagagagaagtctaggaatggggagatttatgtactatagtcagtaaccaatcctgagcaaaggtaggcacagctatgtggtggtgcccttttttgggggggggggggcgggtggtgggggtacttactaaggaccttgcctaagataatcaacaatttttctttttcagccctgggaggctctaaagctggaatcaaaaagattcacaaccccacaaataggtgaactactctaaagcaatggttttcaaaccttgaaatatcctaacattgaaaaaaaatgtggtaacatagggttgcctgtgtcttattttggtctgtaaggacattaataatgttttggtaaaacctcagttatcatctgctattactgttatttcataagacacatcattttccttcaaaattacaatgaaaactcataagcatacatcaaagttgaaagaattttacagcgaaccaccattaacattttgctataatggctttatcatatatccattcatccgtctatcatatttgtaaaacaaataatattttaatgccaaacatatacaaaggatagatcagtaatttccgagaaatattagttgacaacttgacatcaaattatgtacggttaagtattgatacaaaaatacgcacgaatattaagtgttgaggcagatagatgcacatatgtatgtcaccatgtacctttgtgtctccttgcatttaaaaatgcaggtcatgatgtgtaatccccgttcctctgttgatcagtgaacacaaatgctgggccccagcatgagtccttttcagagagtcatttggagacctacagaaaaaaatgccaagaatgcacgctgggaattcattaagagatttcaggacgttgaaatactgtgcgtacttgcaatccccacttgaccaaaggtgtccaaacctcgacagacagcggccagagaaggccccatcatagactctgcgcctggctaattactcaggagcaaagcaggtcgttaggggtcagggggagggtgcacctgtccgccaccccaatttcctcatgatactggaaggcagtctccggtcagcacggggctgggtctagagttttcagtttacaaaagtggaaaatgtgatatgacagactggaaccagcacagggacgcagcccctcacctgctgggggtctttgggtgggtcctgtagccccagagcctctcgatgagctatgaacaggaacagaaccagcaccccgagtggtgacagtgacaaaagggtcctcagtaacagcagtctgctattgttttgaatcattcaaaggaatttttttattttgatagtgaaaacaatttcttttagatgtagaaagggtagaaaatacagataagcgaaaataacaaaagcagaacggtcatcatctcaaaactcagagaaaagggcaccaactccatattcgtacccatgtacgtattcatacccatatctatacaccttcccttatccctgtccctgtctacacccacacccatacctaaaccaatatccacatttatatctatacctatacccatatcaatatctatatttaaatctgtgtatttagatatttctagaaatgcatatatagctatttttgcttttataaaaaaagtcacagaaacaattatattgtacacagtcctatataatctgctttcttttgtttatagaatactgtgaatgtctttttgttttttttttttttgtttgcgagacagggtctcactctgtcactcaggctggagtgcagtagtgcaatcttggctcactgcaacctccatctcctggatgccagcaatcctcccacctcatcctcccaaatacctgagactacaggcagtcaccaccacacccagctaaatttcttttgtgttgctatttttattagaaacggggtttcacctttttacacaagctggccttgaactcctggactcaagcgatctgcccttcttggcctcccgaagtgttggaattataggcatgagccactgcactgggccaggaatatctttctatgacagtaaatattattttacatcattttcagtgataccatagtatcccattatatgcttttcagtaataagttcgaagccaagttcctggatcagcagcatcagaatcacctgggaatttgttagaaatggaaattcttaggccactccccagacctactgcgtctgggggcagggcccagccgtctatatttcagcaagccttccaagagacttcagtgcctgctaaagtttgatgcctactgccttaaataaacttcttcatcccttgtcaaacttcctaggggagcacattttgaatttttgacctgagacctcaaaacttttacctgtgctcactcagttcaggtgaaagaatctttggcattcagaagcttgtgttcacactcacctacttctcatggcatgattcctcttacctctaaattctactgacttaatcaagattgagggattctgggatgaatctggggacactttttggtccctgaaataaaatacgcaaactttggagtatgagtgcgtatttggggaaagtatacctatcagattttcaagaacttcatgaccctaaaatgactctttcttaaaataatttttttttttttttttttttttttttttttttggagaacggtctggttctgtcacccaggttggaatgcagtgtcaggatcatagctccactgtgtgacctcaaactcttgggctcaagcaactctcctgcctcaagcaactctccagcctcagcctccgagtaactgagactacaggttgtgtgccaccatacccagataatttttttttaactttttttcttttttttttttttttttttgagatggagtcttgttcttatgccgaggctggagtgaagtggcaccatctctgctcactacaacatctgccccccgggttcaagcgattctcctgcctcagcctctcgagtagctgggattctgggtgccccccgcaaccatgtcccacgaatttttgtattgttagtagagttggggtttcaccatggtggccaggctggtctcgatctcctgacctcaggtgatgcacccaccttggtctcccaaagtgctgggattacaggcatgggccaccgctcccagcctttaactttttgtagaggcagaatcttactatgttgcccaggttggtcttcaactcctgagctcaagtgatccgcccttctccgcctcccaaagtgctgggatgacaggcacgaatcaccgcgcccagcccaaaatgactttttatttgttatttttgatctcatccttgctgttctgttttgcccaggttggtcttcaactcctgagctcaagtgatccgcccttctcggcctcccaaagtgctgggatgacaggcacgagtcaccgcgcccagcccaaaatgactttttatttgttatttttgttctcatccttgctgttctgtttttcccagttatatcaataacaaagaaaagaaaagaaatctactcagggtctgttgggcatactgcccaagcacagtgtgaaatgactgccttttcactttttatcttttggatagcccaaagaccagcctgacttagcagcctgatttttctttgctggaggcagatcacactctgcagatctccactgaaaccccaccctcacccttcgtaataggcgacatgcacattttcatgtcacatttaaaaatgaaatttttcttgaaaatgttcacatccttcccccagaaattctagatttataaatttctcccaaggaaatcattaggtgctacatgaaagtttatgtatcaggtaatgatcacaaaattataatcacaaattaaaatagccataatgtctaataattcgacattagtgacagagatgatactacagttataggatgaagtgtcataactggggattttggaaaatgattagggacatggtgaagtcgtcatagaataaaattaagtgaaaagagtcaggttgagtgtagaatatatttattcctattcagcatatgtattacaaaatatctgggataaatgagaactgcatgctgacatttacattttctccttgattgtcttatctattatcaggattttctacaatgaacatttgttggtttataattggggggaaacctaaattcataaaataggcactctgttggtggcaaggaagcccactagtccactgtctaagtgttaaatggattttagcttcataattctggctttgactagaccctcttacaagcaagactatatcctctgcaaaagcatcagcggggtcctgcagtgccttcttgacacacacatcagtgtatacccagagctcttgtttctaaatagctgagctgcgtattaagtatggctaaccacacatccatgcatttttctggtgtctacctgaccacccctccaggggagagataaactcaaaggggagaaaaaggtatgggagcgaaagattgcaaggtgcaggtatgtttgcagatgaagggattgtccaggctgagctgtgcagtcctggatgaaccaccatctgggcacttcatatgccattcatacttaagggtgattggctattttcatcatcaagaaaaacattgctttaaaattttccatagttattcgggcatggtggctcaagcctgtaatcctagcactttgagaggctgaggcaggaggattgcttgagcccaggagtttgagaccagcccgggcaacacagtgagaccccacctctacaaaaaataaaaaattagttaggtgtagtggcgtgtgcctgtaatcctagctacttgggaggctgtggcctgaggactgcttgagtcctggaggtcgagactgcagtgagccatgatcatgccgctgcactccagcatacgtgacagagcaagaccttgtctcaaaaaatttaaaaaaaaaagttttttttttttaatcgccataatcttgtgtgaaatacttggtcatctgagcaacattatccttcttctccccatcagcctggcatgagcttggcagatgcaagctcagatcatcacctgtgtgagtgtgttgtctttgtgtccgtgagcatgtgtgtgtgccctgggttcctctcccaggtactccagagctcttgacaataaatgagaacaatatagaggcagggggcacttttcatctcaggccagttccaggactctgtgtaaactgtactaagccgaaacgtattcctttgtcccttttgccgctgtcctcctaatccacatctgggcagtgtgcactgtggctgggagttgacacagatccttgtctcccagacccccagtttctatcgagctactgtaactttaaaaagatttaacaaagactacctccactagctaagctgaaataagaatgtctccggagtttaatggatcaagtagcggtgataggttttatggctcttttttactttagggcatagggaagagagagccgggcaggttggttttaaattcaaggatttatgttgttaatcctccgggctaattataatttatgggatcttggcaaattaatatgcagttgctattcaaaagtggagagcaatgtaaggcaggcataaacaagccttgttcatttttaatttatttccaccaatggagaatattaaataaaatgaacactggggtatttcgctccaagtttggtgttcattatttatctctaaattatgatattcatagaacaactccttgctttttcaccaagaatctagaatctagaattatctgagcgttcgcatcagataactaggaagaaatcagagtcattttctctctaaggcaggctcgatgatacctgcacagaagcagaggtttcccaagcatgcatgttactgcagtacaagatttggcattctgcatgttggggttgtttagaaacagaaactttggagtagtatgtgagcttaaaatgtcagttgcatggaaatgaaagtgccaaccctccaaatcaagagtccagcccgttatgtcgcaagggctttgggaaatctcaatttattgctagcctggtagatattgagcagggtgtgatcctgttattgggctttcagactttcgcttagcaacctcattgcacccaggacccccatttaatcagcgactcctatggctgtttgggggctctctttcaaataattcttctcacccatgaacatctgtcagaaaactttcactgattggcaaccaccaggcaggtaggtttgactcatgtgataattggttgcaccactagaaatgagaatgcccctcctacttccccgccacctcttctcctcttacctttttctccccgacatgcccctgccaacctccccccatcattccagctgggagaggccatcaaatgtagcttggagagctatagaaaccttgagctctgagcccaaggagcaagttggagtcctgcctccagctgtgtagctcagataacagctggagcagagaacatgctgttctctctgctagaatatctgacccaattctgactagtaaagagagttaatagtttgtacctcaagtcattcttgtccctgtgtgaaggaagagaagcagtcatttccctccacctccaacacacactccgtccccactctgtctctcttggctgtttttctcttcattgttgttaaactcacgttcatttctcttgtagtcagggaaatgaagagccactttcaacaattctgaagaagaaatatgggatgttttgcttcgggatggaggctggagcaggagtttctggagtctgccagtacccagtttgaatcccagctctgccttttatcagctgggtgttgggcaagttagctgacttttgtgagttttctcatcattaaaatgagaacactgttattggtctttcgggattgttttgagaaatgagatatcgagacatgcctggcacaaggccttaattcttcttcatggtcaagaaatggcagattttcccccttccattcccacccttgcacatagtaggttctcagcaagtatttgtagatgtaatcgaccagcagagatcatttgtacccttaacacccacagagagtcacagatgctttcactgaaggagggtgtcccaagactcaatggcagggaataaaaatgccaagtcatgtaagtattccacaaagttagaggggaggagtaagtatctcttattcgtgcatctttatggtatgaccaagggctcatgatttgtaagcagttcaggcactgagacccgggacacaggtgacactgtatctgcagattcctttttctcattgtttctctgtcatgtttaatttttggttttgaaaacagcagaaaatccaaccagtgtgttcacaggacttctggctttgcagcaattcctttttctggggtcttttgcctaatcgtttactggtttggagacactgttttctgtattgtttaggactgaaaatgtagacctaactgaaatcaagcactcgagtatcctaattattttaaattcataatgaatagtcatcatggtttcactttttttatgtactcttttgaaagagtacgatgggggaataaaagccagaaagttaaaaaataaaaatagaaaagagctgcaattgtcaagagaccaaaaagtcttgtaaaaagggcagtaggtaattctggaggcaaatcagcatgggtaatgtctaggcaaacaggatagaaaaagatcaggaggtcacagtgacaaaagtatttaggctcatcatattagaatttcatccaaagaacaattgattatgatttatagaccacaccatcccatgagcccagatgtgtgtccactgggcctggcaggggacaaatttatgtaacagactccatcctgaattccagtcctcaagctttgagggtaataaactcaagctttgcaactgggtcaagatcaggcctgtctccttcttgatgatgagttgtctcataggaccctgttaagcaccatccccaaactccattctttttggtgaatatcccaacaaactccccagccatacctcaatgtccagacttgcctgatccccagggctggacacagaacaggctcattctgagaatcttctctctctccctccttcccattttgctcctcctaccaacatgagaagctagggggtctcatctttaaataattaattcttctttctttgtaagtattatacatgccaaacagactcttggtttgtgtctactgacccaacaaaagggctgtccacttgacggacaggcaacagatcatcttgataagtacatgaggcactcagatgtcaagtcaccaaaccttcattctgaatatttttgaggctcatgacagaccaaaagagccagagagttggggaacataatttcctttgctcataccctggaccaagaactgttgccaggaatatccatccatctgggggcttccagcttccccagatgcctgcgtgccttttgacccttctccttcccccaccctgcgagttcttcaacaaatactcttctaaaccaacatccccggcaaacgggagcaagacaccagcttttcactgatgcagatatttctgatcttttcatctcggttttatttctcactctcccactgcataaaagattaagaaagcactcgcatgaatgtttgcacatcatttaaatattcattttcattaatttattcatagtcgtaaagtttattgcctagaatatagagtcgtagaattttagagctggaagacaggagagaaatcatctagtttcgccgcctcgttttacagatgaggaaactgaggtgaagacagctcaggagaccgtccaaggtcagattctgaagtgagccaagtgagacccaaactcaagtcttggacagtctagcctctgtgcagcgcagctcagcacagctgaaaaccacttttgctctctgctggcatagatggctgtgctttggttcattttcttgctcatcttcatgatctagcaagttcttgttgagtgccagcccagtgccaggtgctgaagaacaatggtgaacggcacagtcatggtaccagaactcggtctggtggaacagagagattaagcaatcagaaaaacatatgtgtgtgtaattacacgttgtgataagggttttgtggggaatatacaagctcaatgtggagactagtggtgggagggcagaggcattttcccaggaagtggagaaagggaaggggaagcaaaagccatcccagggtgcgttagggagcaggtactgctgtggatgacgggtgaagaattcacctgggaaacttggggagaccatgtggaacatgccgtctctgagttatgccccatcagggggcaaagaaactggagtacttacccaccagatcctcatctgtcgttggttgaggactgctctcaggacattcacatccaggcacttctggtccacaccttggtacaacatttgcaatattagggacatgctaatacaattattcattgtatatgttaattcaaattaaatggaatgtcctatattttatagggcaaacttaggcttacgcctgggtggaatgagcaatccctgtcgccaaagaaggtccccagcatagcagttggctggagaaggaagggctgaccataagttgcactaaactgctctcagcagggtgacctggaagatcttggagtgtagatgtcaattaaggcaagtcctgagggctcggatggagccaacttttcacccgaggaggggaagagggagggttaaggagggcaaaggagagatttccaggcaaagtgcacattaaacaccagatgcgaagagctagacccccttaatgacaatttgctttctgtaatcttgaaccagggtctctcagtgtgtggaaggaatgtttgaatcggagtagcagggctgagtggcagtcctaaggcccagccacaacgtgttcttgacaagccatgtctatgtctggcgatgtgctcgcatggcacatgatcctgtttgacttcctgacagccccaggtgctggcctaaggccttccaaatgaggaaggaaggctggaagaagttaagtcatttgctagtaagggttagagccaggatttgaacccagatgactacagagttcatgcttttaattgctgcttgttaagtgcatctattatgggttgaattgcatccccccagaagatatgttgaagtcccatcctgttacctgtgaatgtaacctcatttggaagtagggtctttgcagatgtcatcaaattaatgtgagatctggctggattaagatggagcctcaatccagtgactggtgtctttattagagaaaagagagggagatttggagagacacacgtgtgtgcacacatatctacgtatctacatgtatgcacatacctacatgcatgcacatacctacatgcacacacgtgtgcacacacacaagcagaaggccatgtgaagatggaggcagatactggagcgatgctgccataagccagggaacagcaagcattgccatccaccaccaggagctggaagtggcaaggatatgttctgccctagagccttcggagggagcgcagcgccagagacaccttgaattcagactctttgagttcctgaataaagagagaataaacttgtattgtttcaagccacctagtttgtggcactttgttatggcagccccaggaaaggaacacagcatcccctgtcaacaaaccaaggggagctaaagatataccctttagccaagtaaaccagctgccccgagcaggagcacagcttccagatcactcatcaaggggccgtgggtgacagggctggcctgctgctgcctttaatgggcgtagatgttgttgttcatgtttcccagcccattggtgatgacacagaggcaggagccggggctgcagactaaattatatacatctcaagggcagttagacaattagctcgcccacaggaacattgcaataagcacagtatctgctttcccagcaaagccaagtgcaagttcctgcctgctctgatgacctcttgtgcctccagtgtgggaagggaccaggtccctcaatgctgccgcctcccaccctgtgctgccacgtggatttaactccttcgtgttccccatgttcttagtcagtatggttgttgtgccatggattcaaatggggttgcttgatttgatttgccctttacttggctggaattctctctaacaatcaatggaaacacagctcatagggatgcatgtagcctgtctcatatgtgaaaaagaaactttcaatgtatacttcatctcattccaacaagaattggaaacagcaacatcaggacttatatggtgcagggtggtcagtaagtaggaaagaaactcggggcatggaagtgaacaggaagcccagagtgaagccaggacccaaaacccacaggtgctgctcttgttataagccagccacacatttgtctttgagccttttagcagctgccacaaactgggagaaaccatcagttatgcagtttacaatatctctaaactcaaaacaagccagtaattcagaaaaagcccagttcttctcacaaagaaagatctaagtgtgatatgagagtatatgcatggagaatattttctgagctggtgatgagctgcagggggcctctcccagcccccgcactggttgcacttttaaataagagaaaaaaacagtgataggactgacctgcgtgtagaagtttcaagttacaagaaaaacacttcacaggatccaaatccttaaagtcctgaaggaaacagagagcatatacaccagctttcgccacccaattcggatgtgttagaatgaagagtctcttattttttaatgaatttttctctatttaaaagtacagggatacctcagagatattgcagatcccgttccagaccaccacaataaagcaaatatctcaataaggcaagtcacatgaattttggagtttcccagtgcatacaaaagttgcttacacgatataatagactcttaagtgtacaatagcattgtaagaaaacaatgtacataccttaattttaaaatatttcattactaaaaaatgctaatgatcatctgagccttcagcaagttgtcatctttttgctggtggagggtcttgccttgatgttgatggctgctgatggatcaagttggcggttgctgaaggttggggtggctgtggcaatttcttaaaataagacaaggataaagcttgctgcatggattgactcttccttttacaaaaggattctctgtagcatgcactgccgtttgacatcattttactcacagcagaatttatctcaaaagtggaatcagttctctcaaactcgccactgctttatcagttaagtttatggaatattctaaatcctctgttgtcatttcaacaacattcatgacgttgttcatgacaatgttcagtgttcgccttcaggaagagcaagttccattgcaagaaatcactttctttgctcatctctaagaagcaagtgctcatccattcaagttttctcatgagattgcagcaatttagtcacatcatcaggctctacttctaactcgagttctcttgctatttctaccacatatgagtcttgaaggggctcaagacttacttcctccactaacttttgaacccctcagagtcacccaagaaggtggaataaacttcttccaaactcttgttattattaatttttgatcctttgccatgaatcacgaatgttcttaatggcatctagaatgctgaatcctttctagaagattttcaatttacttagcccagatccatcagaagaatacagtatctgtggcacctgtaggcttctaaaatgtatttctttaataataatacttgatagttgaaattactctttgatacataggctgcagactgggcattgtattagcaggcatggaaactacattaatcttgtacatctccatcagagctcttaggtacgaggtacattgtcaacaagtggaatatttttattttttttattgttattgttttgagacagcctggtctggaatgcactggcatgactgcagctcaaattatcctcctactccagccttcccagtagctgggactacaggcacatgccactaggctgggctatttttgtatttttagtagagacacaatttcaccgtgttgcccaggctggtcttgaacttgtggtgaatcaatctgcccaaatcagcctcccacagtgccacaattacaggtgtgagccaccacactggaccaagcagaatatttttaaaggaatacaaattttttcccaacagtaggtctcgacagtgggcataaattattcagtaaatcatgccataaatagacgtggtctcatccagggtttgttattccatttatagagcacagggagagtaggtttagcataattcttaaggaccctaggattttgggaatggtaaatgagcttggcttcaacttgaagtcaccagcagggaagagagtcagcctgtgcttcgcagctttgaagccaggcattgccttctcctccctagctctcaaagtcctagacagcatcttcttccaacagaaagctgttttgtctacattgaaaatctgttagtgtagccaccttagtggtcttatctagatcttctggaaaacttgctgcagcttctgcatcagcacttgctgcttcatgttgcacttttttgttatggagacggctttcttccttaaacctcatgaaccgacctctgctagcttccaagttttcttctgcagcttcctcacccctctcagccttcacacaattatagagagtgagggccttgctctggattagattttggcttcagggaatgttgtggctggtttgatcctgtatccaaaccactcaaacattcttcatatgggtgataacgctgttttggtttctatcatttgtgtgttcactagaatagcacttttaatttccttcaagaactttttctttgcattcacaacttgcctgtttggcacgagatctggctttcagcctatgtcagttttcgacatggctttctcgttaagcttaatcacttctagcttttgatttaaagtgagagacatgcaactctgactttctcttgggcactgaaaagccattgaagggttgtaagtttgcctaatttcaatactgttgtgtctcaggtaatagggaggcccaaggagggggaaagagaaggagaacagcaggttgctggagccagtgtggtattcataaatataacatttatcaattaagtttgccatctgatatgggtgcagtttgtggtgccccaaaaaatgacaatggggacatcaaagatcactgatcacagatcaccaaaactgatataataataatttaaaagcttgaaatattgtaagaattatcaaaatgtgatacagagacatgaagtgagcaggtaccattggaaaaatggtgccgatagtcttccttaatgcaaagttgccagaaaccttcgatttgtaaaaaacacagtatttgcaaagtgcaataaaaggaaatgcaataaaatgaggtatgccgataatacatacagctcagtgaagaatatcttaaaaatatttaaaaagaaggaagaaaatcactcataattctgctgcccatggcaaccacaattaacccatgcctgccttccagtctttttaccacgtgttgtgttgtgtggtgtttgtcccacatagagatcattgccatacgcccatttggcacattgcttatttttccctgtctttatacatttcatcatgttgttctaaatgcttcttaactgcaattcttagtggttgtgatagtccacagaggggaagcattgctgtttatttatccatttctatgttgttggtcatttatatggttttaaatacttttggtgtcataaggagtgttgtgataaacatctctgtgcataaagcagtttctatagttcccattatgtctttaggatagattcccagaaatggaattactaggtcaaaggttgggcacattttttaaaggtttgtgagacatattgccaaattgctctccaaaaggtttgtagcaatttaaatgatcagaagcagcactgaagtccagtttcgtctaaccagtattgagtgctcattaaaaaaaaaaaaatcattactaatatgataaacaaacaaatggtgtgttattgttgggttgaaagaagcaaatttggagaatccagagaaacacagcggaaattcaatttatgggctacattaacccagcattttggattggagggtttctaaagaggtttcgttatattaatggatgacaagtggatacttaagaaaaagtgtattttggagaaagttgcaataatacctactagagattgtgtcctccctcaaaatcggagtgccatccgcgctccatgagtctgacactttgtaggtgctttataaatatggattgaagcaaatgagtgacgttcatatgatgttttgcagttttttcaaagtgggttttacattgagaatctcatttttccaacaaggcaactaaggcatggattcaataatgtgccagcggcacacacatagcaaatggtccagccacgaagagaacgggactgtccagccgggaggacagtatgcttttcacctccctctgtacccttctctgagaactgtttggtttgaatcatgatggcagtggctggcttctccacgatgctgttgtgctgaaccctattaacctcatagggaagacactaggatcaagaggccagagaagagacccagagccagcaaacaagacatagggttttattaggggtttacctacaaaggagagagtttagtggcagtgggctgggcaggagaactgccttatgtacagaaatggttcaggggccgtggaatggacaagactccactttcctacagtccagtgtcagtggctggacaacataaccacacagcccagtggccgtggcctgggcagggaaaccgcaactgcctgcaggaagagtgcagtttatttagataacattttcacttaacatcctgccgttaatgacctccacctggcaacctttatttaatccaaaactcagggactggattttccatacggcctgtgaggccagggggctcagttgttcctcatagacagggaatgtatctcctgattggccactcccagattccctagctaggaacagacattcaggtacatatacccttcagagagtcattctcaaggtatgctcaagctattgctgtcaggcgcatttaccctacagagctgaactaccatttcctcaaaagtaggtacagatggggtaacagtgggcaatgtggccctttctgcacttccacagtacccgaagtttaggcgcccctcctgccaagagcccccattagcagcaaaatatatctcacatggtgcccagagcaaaggaccctgtgctagttttttgtggctgctgtaataacggcaaactgagtgacgtaaaacagcagagatacatttgctcacggtgttggagcccagacgtctgaaattgacactgcttctggggacactagaggagactttgttcttcgcccttcccggcttcaggtcgcggtaagcattccttaactggtggtcacattactctatctgtgcctccatggtcacttggacttcccttctgtctgtctgaaatttccctctgcgtttattttttgttgttgtttgtttctgagacacagtctcactctgttgccccggctggagtgcagtggcatgatcttggctcactgcatcctccatctcccaggcttaagtaattctcctgccgcagcctcctgagtagatgggattacaggcgtgcgccaccatgcccggtcaatttttgtatttttagtagagacgaggtttcaccatgttggccaggctggtttcgaactcgtgacctcaggtgatccacctgccttggcctcccaaagtgctgggattacaggcgtgagtcaccatgcctggctatctgcgtttcttctgtaaggatacttgtctttaaatgtaggacccacttggaatatccagaactatcgtatcaaaaaatgtttactcacacctgcgtataccctgtttccaaatagagtcacagttacaggttccggggagttgacatgggtatcctctggggcagggggcacttttctgcctaccacagatactgaggtgcattgctaattacatgagtacagcatttgtgaaaactcgctcatgatatcttctccatagtcgcagtcagtaccagctgctgtggaaaaaattttacgcattgtgtttacaacagaatatataacatggcttagagacaaagtgttttacttatggccagtagatggaattctaaggtccgatgtcggtttgccatgacttgggcattggtttctgttcggctctgtttacggggctgtgggatgggtacatagacactcgtctacttgaacttccagggactcgggaggcctgcagttgaataacaagagaccgtgctggtgagaggtggagtttgcagtaggatttcaaagactccatggagtccaaaaggtgggaggtgtgttttggggcatgcgccaagggaagctgggctttgggaagagaaaagaatccgaactggtggcttcccacaattgctgggagtctgagatagattcaattgggaaaactaggttagtgccagataaggtccattactctttaaaagtggccactcatccctaataataaataaaccaaacattgggatattaaaacaattcgttctcagcatcagaaaagaggtcgtgtgtgtgtttgtgtttttttaatatcccatccagcccccagccccagtaaccctaagattgaacaaaaccctacttacgtgctacggatttaatatagcgtcaggctcctctaggtacaataaaataccaagttaagagcattaattccttacaaccctgatgggtcccagctgtgcacacgcatgtagggtgtgagggtgtgtgctcagcgggcacaggtgctgacggggctgttccacctcggagcgcgtgggccgggaacacagctgtttctcaaatcatccgccacttgcttctaaacctctgtgaagttgtaccgcctctgggcacaattaaaagctgtatactacatttcatcaggtagtgttagaaatttaggctgagccaaaaaagaaaagggaggaggtgggagggaggaagcaacgagtcccttgttcaggcggcattaacccccttaccctggctattggaacaatagcgcttctaaaagccgcacaaaatcctccaatattaagaacggagaaaaggagtgtggaaaaggtgtgggcaagcacggcatctcttctttctttttcttctttttctgtttctttccttctcttgctatttcctttctttctttttccttcccttccttccttccttctctctatccttcctttttgtcccttccttcccctcattctttctttccctctctctttctccgtctttctttcctccctcccatactctctacttttcttcttcccttccctttgttttcacgctaattccttaatttgtttttgggtctgctcgcaggaaataaccgtaagctaggataactgaggtaaaatttgtacagctaagctgaatggtgaaaggcccagatttagttctcattgtaggaaaaagggccagaataccttgcccatttttgccttgggaagtgagctcaatgaaatacatcttcatatgcccattttacagaagcagcaactgagggctgttgtactgaggcttgcaatggccacctcaacttttaggtctctgaggcagcaatgggacccttgccggggcctcgccatccacatggtcattgcctcaaaatttgggattccagttgcccttttccttcttctctcttgaacaatgtgaacgcaaggtgaggatgggccttctccgccttcaaaagttgctgccttccaaggggaaaaggtctggtcttgtaatttctggtctgtgcgtgctgtataaggaagaaggtttgggtagggaagcaacagagtacccactagtgagagggaggacaccgctggtctgtgctcaacagccaggccagcaccacatgaataaagcatgatggcaattgcctgactctgtcctcggtggggacaggagagctgagcataaggatctaagtttagacgccctcctaggattaccaacgtaggcgtgatcaggcccataaaatactgcacatcttggcatcttacctataaaaataatgcagatacattcgtaactccccaggttttcgggagtggaaatgagggcagctggggagtgaatctgtcgtttgttgagactctttttcctgcttgccagacactgatctaggctcattcatacaccagttcattcatcctcataacagttctgtgcctgagtagattcttgtccttatgtaaggattaaggacgttgagacccagaagggtctcatctaacaggcagtagtagagccagcagtcaaaatagtttgaccccaaggctccaggctttttccctatttctttctcacccacagccaattgcaatctggaccctttacctgtcagctgtaggaacatgaaataatgtgagtggggtgaaataatgccatttaaaagcaggcacattataaagaattatgtcaacctgatttcttgaatcccaggacaattcatatccccgtgccatccgattagtgaatcaagagaaactgattgatatacagcaacaatagttaagaaacaggcagcatcgatggaggtttgattaaaccgataccctgggtctcctgctgtatcaaatcatgggcgaattggtaccattaggataaattactacaagaggcactgcaaagccaagctaaataaactctgccttctcgagcccctgattgtcttattaaataatttctttgcctcttaagtgtggactcggagcactcgtgctctgaaagccctcctgattaactatagccttggcctcaagttgattttataaacttcggatggtgccccagagggtgaagcttcctgttgtcaattctgcccgttgctatagataccaaactccacaatcagtaattagagcgtgccccctgccccagaactggtcaaacggtgcagagcgctcggcaaatggtcttaaaagcatccgcgcttgcatggaaatgcatttccaatggtgacggggtttgttttattcatggactttttgaaaaaaaaatcactggtttattggaaaccatagagaagtataagtaattattatgctttttaaaatacaaccgaggttcctcatcatgatacgttaagggaaaggaagacagggcaggagggtggtgtggcacaaaggcggctctgtctgacctgtcacgttaggactgagttcattcttgttcagattcagcatcttttgttatacccgaagtgcattccatggccctgtcccagccatagaaagaaatgcctttatttttaagcgagacttcttgtggaatgatgaatatgttcagggaggctgttgatggcaagaaaagaagggtgatgggttgggcttatattgtttagtggagcaaaacagatgtgaaacatttgtgtcttaaagtgttttggtcaagagaaactaaattggttagaaagtgtgcaattttgcaagctttataaaagtataaaccaatgagtctggactctgttccctaaaggggatgaggaatgaaaatgaaggtttgcaaagacatcttgccagacccttacatattttaatttaaggtggtattactgtcctcattttcaagctgaagaaccaagctctgagagagttaatgattttctccagatcattcacattcatttctgttacacagctgggattataatccatgcctgtctgactctgaaacctattttcccatctttttttttttttttagggataaatttctcccaaactatatgcagatcctgctagagactgcccatccctctatccatttctcagtttgaaaagaaatcctggaattcagaatgatgaatattcattttaacatcatcttaaaatgtccttatagatgtatattacagctgtagtctgccaggccaagaattcgattggcatttccagagtactgttgattgtattttagaatcttccaaacctccgtaattgtcttgttgatttcaaacaccctgagaacatttcctaaatgctcatagcgtccaatagcatgggaaagtaaatggtttatgaggagaatttgggatgtgcaaaataagcctttgaagagagtgcattatctgaagcctgacattgtaacagcttcttaattacgctttctttcatgtggcatttttatgggatccagtacgcccaggctcaaatgatagacatttcaactcctacatccaagtgtagggagtcccaactttttgaatccatccgtgtggcaaatgtagctggacccttgggatgaagacccttcctgcatcctcccaaggagacaagttctgggccataactctagagcaaccccaacccccaggccatggaccaagtgtcaacaatgttgacattgtgaatccctgatctggaggaacatagctttggggcagtgccaggatttaatatgggttctttggacttcagagccccttgtgctaaattgaaacattatggtgttgctttgagcaaacaattagcatttttgccatagctttttacttctccatgttgaaattatcaaagattatcgtcgaaggcgtggtttctttactatctgtcttctccaggagactgtcatctctgtgagtgcaggaatccggctggtggtgtttttactctaacacctctttcagtacatacatacagtaggtgcttagtagatgtttactgaatgaatggataaacatgtacaaaattatgatcccttgtgttaaatatggtagggaagcaacataatgtgccctggagtttcacagaagaaggggctttcttccagcttggggatggaggtgagctgtcattctggatgatgtgatggggaaagaggatgtgagctgaggcttggaaccaagcagagcttgggctttggggtgctgggaggacagaatgctggaaacagaggtaagaagggtaagcacctagtcaacatgagtgatttagctttgggagctgatcaagtgatatgatttggctctgtgtcccaactcaaatgtcatctcgaattgtaatccccacgtgtcaaaggagggaccaggtggaggtaatttgatcatgggggtggttttccccatgctgttctcatgctagtgagtgagttgtcatgagatctgatggctttgtaagtgtttggtagttcgttctgtgttcattctccctcctgccgccttgtgaagaaggttcttgcttccccttcgtcttctgccatggtggtaagtttcctgaggcctccccagtcatgtgaaacggtgagtcaattaaacctctttcctttataaactacccagtctcaggtatttctgtgtagcagtgtaagaacagactaatacagcaagggagcagtgatggagcacaggctggaaaactgagttgaggggtcagtggtggaccctgaaggttagactaagaaatttagactccagcctacataaatttagactccatgcagaatgactggatgtcctataggacatgcaaagccacagggaattttggaacaggaaattgtgctcaaagctgaattttgaggaggtaaatacagcctctgtgtgtaagacagagaaaaggagagagtgggaagtaatttatgtatcacagttgcctagagaagacagaaaataggtgcctggcttatgtggccactgctttttttttaaacttatttctttaattttatttttttttaaattaggattaaaaaatgtacatatacacataaaatatttatttttgaataggtaatacttttatatggttcaaaaatcaaaagtagaagataaaaacaaggtgtatatgtatatatatttatatacctatgtgcatatataaaatccttgtatacatatacacacacacacctatgtttttctttatgtgtgttaaaatctccctctacccctttcctttagcacctaattcctcttctgaaccgatgttatttcctggtgcatccttctagacattattatgcatttacaaggcaatatgtttgtatattcttctgccctccccttcactttgctatacacaccttgctctttttgcttgacaatatatcttagagatggttctaaatcagcatataaattatttcttcattttttaacaactgctgagtattacactgtgtggatgtttcataattcattgaaccaattccctattgatagacatttgggttgttcccagccttttgctattgcaaattgtgccgcaacgtgtaaccttgcaccgacatcgcttcccacgtgcatgcatgtatttgcaggattgagtcttagaaatagcagcatcggctgagagagtatgcactccggtcgttttcatagatattgccaaattgccctctacggaggttgttctgatttacattcccactaagcaacatacgacagttagggtggcatttcctgactccatgctttgtagctgggtggaggggtggactgagagtacatgtggatgggaaggtgcaagtgaatgctctcaaaatgtgctttaaggagaaatattttgttgggacacagaagttagactgcaagaaggagaagattggattcagggcaggaaatcagtacaacttgcagtagtccacatgacagttacgcaaaggcctggtctgatagaggaacaagagagagagaaagtgcatggcaaagacccatcattgatgagtgactggatgtgaggaatggagcaggggagatgctgatgatttggttacccccttctccatcccccaccacccactgatgttattatccagtaaggaccaggagagaagaagagatttaagaagaagacaatggctgtggtttgatgaagataaaacgccctgccagaatcatttgagcaaaagcttaatgttgtttgtggcaatgtcacttactcctgatcccattggagaaatctttcctatcacttccaatccacgtgtgttcagacaaacactaattttgttagtacaacgtcccctaatagctaagagttaaaaaaaaaataggtcttagaagtgtgaaaaacaaaaaacaaaaaacaaaaaaaaaaacactaaaccccaaatttgtccttttaacactttcagcaaccctgtaaagtcattatcatccccctgttacaggtaagaaaattaaggctcagagaggttaaataacttggccaaggtcacacagctattaaggaatggtaccatgtcttggacccaggttaactttaaatcctgagctttataacggtttgatttcagtagcaaatgcagtggcacagaagggtctgggcatttatttccaaagaatgatttcactcaactgaggaattctaatgttttaacagcatcctacttatttctaaagtgttggggtgaatttgccaaggtttgaaaagtgcatttgtaagccagtaggattcaatctgaagtcagggataacagagccgggggcggaggctaggtctccttacatattttgttcacaatgggactagaacactctgcagagtatgaaggttgtgattcagttgcccaagcagtaaggcctgactggtgtcacgatcccacaacccgcacaaaggtgccattgttgcccagtgtgaagggagctgaggcatcaccaaagggggccaagcgtcccttctctgggttagaaatgttgttttccatttgctggtaaacaacagtccaagttcattgtcctgacacagaactctgtttcttcttttatgctgagagtttgcaagtatggatcttgataggaatgcttgcaaacaacggtagttataaaatgttgcctcctgtatctcagtaggcactgttcaagcatttgaacttcatcaagtatcaagacaagtctaagagaaggtggggagagaccatcagggcctaggattggaaaacctccaacgcaaaatagagatgtagttttagcgtgctgcccaatattaaaagattgtataaatgaggggggcacacttcctgatatgttcgttatgcacatagtcacacacctctcagtgccttaaaatttgttatgatgcagtctatctcgtatggaacgatcttgatgtatctatcaaacacgggagaaaaaccacttaaaatgtgtaaaaagtttattaataaaggagtacatgattgtgttttaaaagctacatacattaggtttaagctgcagaaaatggcggtttattccgaaagactgctgtatttatgcttaaataattaggattacctctacctggtatatttgcagggacaagcaaagcatacactgaaaataaattctcaaatgaaattcatttcacattagttgcatcccaacattcctttatggactgcattccatgcctggcactgtgcctatgatttattaaaatctaaagccattaataaataaattattcaatccatgcattgaattatctagctcattcaaagacagtcacagtccatccctcaaagagctcatggaccagtcgaaggagggtgacagcctgggtcaaattggtgctgagcacacaggcaggggtcaggctccctggagtgaagtgtaagcgtcgctgttcactggctgagtcatctttggtaggtccctttaccactttgccactttaagtctccgtttcctcatctgtaaaatagaggtaataaaaacagctaatatttacagagagcttactccttgttagcagttttcattaattaatgggtgtatttattggaataaccgtgtaaggttgccatttttatttccatctgtgtgttacagatgagatgtgtaatagaaagggaatttgcccaagctcacagtcacaggctggtggagttgggatttcaaacccagagtgtctgattcctgaacctgtgctcttgtctcttccttcagtaccacatacaacagaggggacaaaataatttctatataaagtgcttagcatagtgcctgccacttagacctcaaaatatattgttttcattggataattaaatataaaataacatacagcatgatgattaatacaactaataaatagtgcattagtattataggcacaaaagacagtatgaagtacagcacagatcatgaggagggtagggtcagttctacgtaaaaacagggttagtaaaggcctcagagagaagatgtcctttgagctgagtcttgagactccagagatcaggactcaaggactgtggaacctgtacattcacatcctggtaatcttacattgctcagaagactccagggacattgaggttgcccccatggagttgaaactcctatgctgatcacttaggaagccaagaacaaattaacccagggcaacaagaaacaatgactaattagaccctaatgaagtgctgcggtactggcgtccttccagatttgacttgtaatcgccacaatgtattacagatgcagagtcttcatcttgttgggctgtgatcaagtacatatgctccccagcagttctttgagatttccatgttctccgcacagtgcggagctactgcgggtgtgtgagccaagggggccctgtgacccttgaaatagaaaagggggaaatggctgcatgccaaccgaagagaccactgcattgttggccataagtgaaactagtgagatgtgtgggatatcataaaaagaacattgacataatccttttttggatgaagttatatcacaaccagaacacacaatgaccagcaggcttctctttttttgtttgatttcactcctgaaaagtgggctttctgtgagagttggacagactccatgctgcccctgcctcccgggccttccttcccaagcagggatgagctctcctctgcatgtaacaagcaaggtgattcagcaagaagactgctggtctctcccttcctccagggccatttgtgagagtgagacacaaaatattagaagcaaaagaagaagctgtactcccaagaggcatggatccttgagtgagttatgtgcttggaaaaaattagtttgcacatgaggacacaaagagagcctgaaaagcaggaggctttgaggtctttttttccctcctgattcggagggaaaaaaaatgttgtttgtgttcatttatggaaattagatctatcacatactcttatgcaatttatgaaatgttaagcaatacccctgaatgtcctagtcccaggaaagttgagagttgagtgcaagacggggacacccaggagccagtaaatcaactcttgaatgatggtgtattaagtgataaccttgtcatagttaaagtcacactggaaggatatatattgaggctttatctctgccatggtgtcagcatcagtgaattaacacagggtgtcttaacttttcaaaaacaggacatgggtgatcaagcagcagtatatctctttactccttgtattagtccattttcacactgcttgataaaaacataccctagcctgggaagaaaaatcggtttaatggacttacagttccatattgctggggaagccttacaatcatggtggaaggcaaggaggagcaagtcacgtcttacacggatggcagcaggcaaagagagtgagcttgttcagggaaacccctgtttttaaaaccatcagatctcacgagacttattcactatcatgagaatagtacaggaaagacccacccccatgattcagttgtctccctccaggtcccttccataacacatgggaattatgggagatacaagatgagatttgggtggggacacagagtcaaaccgtatcactctcccacccaacacttgcagaaacacacacacacacacacacacacacacacacacacacaccccttcctacgtcctacatccctgtacttggaaagcaatcatatttaaatcattgctgctggaactttagttgactttataagttacattttacataaaaaggcagcagtggtgaagctggaagagggcacctaggctttgatttcaggcaagattttgttaggtcccagtattgggacttccggttggtggattttgctcaagaatagttttctctttgtctaacgcttcatgagagacaacctaaataaagccacagccagtgttacagaaatagtgtttcgtgattaaaataatggtacttatttgggagagttacttgccacgtttcagatgattgggaggtagtcttttcaggaatattctgagtttgtttcttgatctcgatagcagcaacctttccatttgctctctgtctggtttctctgtgtctctctttttccctcaaacatcgcttttctttttttaaaacaagaataaatcccttaggaccttgctaagttattacttatattgtcgcttaaaaaaaactttggaaagaggctctggcatactttaaaaaagttaagcacactcaagcctctttaattctaaattcagttttgaatatgcttgtactgatgtcaatgacttttcaaaagagagtgtcccaattatttaggtggccaagagaaacagctttaattctttatcacataaatatgcttcaaaccacgatttaaaccagatggatggagcactggattagtggtggggcttcttggctgatctgagtttcgcctcctcgatcttgcctgggtctgttctgtcacttggatcttaccagtcctggcaggcacacagctctgtgagattttccttctggctttgcatgaagcttttgaaaagaaaacacatacatgcaagtgacctttctagggttgtttctagtttcttcgtcttacataaagcccctgctaatttagcatggtgtgtgcccgagtttattttctttttaacaactttatttatgtaattaagcgagtgaagtcatacattttattgatctaatgaaacgcatttcatggttcctcctgcccttcatcttctgaccttccccttcagatcacagccctttactttcgtcaatgagacgccacttaacaattttccaccttgccaaatttgaggtccccctcaacattaacggggaacccaatatcagttccttaaatgggagcaaagattgatgtcaatataaactatgacacacattcatattgcagaaagggtaagaaatccttacacagaacgagtacggtctctaacagtaaagtacagaacaggtggttctcattttagtatatttaaacttcaggtccttaaatgttcttttctttttccttcattctgtttctttattattttaatggagtgcaaggtgcagtctttttgaagatgtagaatgtggccttataaaagctaagtgctactttatatttctgctgtccttgccggtggcctgcactggggagttgtatattgtatcagtaattttaaaagccagcaagtgttctaccagctgaagaagttttcctaatggtggctggtcaaacgtattacttaactaggcgtatagaattgaggggaaatgcaggatgtaatgaaatgacattggtcaatcctcagtaaatgtttttttcaaaggcttggcacaaaaaatgtgcaaaatcttggaggtagatttttttgggggcatttgtcagggaagagattaatataatactcagtgaattcaggcaagtcctcaagaagaaaaatttaaggagcaaatatgtgagccaggatctcatgctggactatctaagcaagcatgtaggaagagtttgtttcttcctgctatggccatagaggtttggttgtcactatgaagaatgggcctgtgtttttttttaaaaatatgctgatctgggtgaggtcacattttgctattctcagtggagggaataattgggattatcttatgatttttttttctctttaattttcttacaaaggaaaaagaaagaatccaatttgttataaataactgctgagggcagtacatgttgcaggtagtcactatctgggactggtggcacaggcagtaaaggattcaccaagacagttgtaggtaaagaaaggtggatttattggagaagataagaaagtacactgtaaggttgcaacaggcagcccagcatggaaggggctgtctgcaaagaggcaggggctggagggactgaagttatacagggtcctgttggagggagctatgtgcagaatgaggtcgaggtcattgtgcctgcggattgtttgttgttcttccctacccggggcccactcctacctggggcctcttcctcattgctgcttacttattagaactccacagtagattttttataaatgcagacacatacagacacccacacccacacatacagacacacacagaaacatatacacatttaggtcgcgatttcttcacaaggacattcttatagacatgtcatgaagggacttggggctcagagaaatgaagtaactcagctaagtctgtacagtacttagccaggggatttagaaatccacccagggatggctccagttgcctgtttcttttcatttgacacgggatggcctaatgggtccccaccaggggtggcttggaaaggagaaagcaactgcattcccactggaaggtgttctgtagcaaagtggagtgaatgccaccaataatgagttccaaacagggtatgtgtttgcagacaggagctacatacatttgaaaattaggatgatttgaaattgaaatgagggcttatgctgttcattggattaatttttctctcttataaataaaaaatatatacaaataatacataaacattgtttttcactgtggcttgaattttctaacaatttttttcttcttctcaggaaatgttttcttcttatacctccaaaataaccactgttgacagtgtattgttaaccttgctagaaaaaaatatttatttttgatccatacacgtaaatatgcatactcataaatatgcattcatattttgtgtatgagtacacttgttaatttacatgtatgtcttgatttatatacattgttctatacctttccttttcccataattttatggattacatttattttcatttctgtatatttagttaattcttttaaaaggctgcctgttatcccattgtctgtcttcaccatcatttacttatgtaataaatctgttaaataattttaatataaatctattcatctatccatctattaaaagagatttaagttatttctaatctttgcatattataagttgcatttcagcttataccttgactttctttgacatatacatcaataggtagagtatattcctagaaattcaattgtggaccaatgagatgtacttcaaatttttaacagatatttcagtattgacctcccaaaatgtattcacacacccaccaaatctaagtgtctgtgtaacacacagatgctgatttggagtattaccattttaaaaaaataatatagctatcagtcgtgtaaaaaaaatcctcaccattatttcttaattttacattgtaattgtgagtgatgttgggtagatttttgtacttttattgaccattcacatttcttcttttctgaactgcctttccatattctcggtccagctttctataagattgctctcatttactggtgagagctctgtgtaaattaaggaaaccatcaccaccttcgaatggctgactattgtaaatattttaatgtttgtcgtttgtttgcaaccttgtaattttttcctgtgcagcaattttaactttctatattcaaatatactctgaatgcacagtgaatttggcagaataccatttaagtcttgtattttccaaagctagtcaacgtccaactgccaatgttgcctgaacaggaaatatttatacctgaaagcgtccaggtgagagtcaggaaagccatgaaggtgcaactggcatactgatgtcacttcttctttttttttttttttaagacggagtcttgctcttttgccaggctggagtgcagtggtgcaatctcggctcactgcaacatttgactccctggttcaagcgattctcctgcctccgcctcccaagtagctgggattacaggcatgcaccatcacacccagctaatttttgtatttttagtagagacgggattttaccatgttggccaggatggtcttgatctcctgacctcatgatccacccgcctcggcctcccaaagtgctgggattacaggcgtgagctaccatgcctggccctgatgtcacttcttaggctaatttctgtgaaattgtgattgggaggaaaaagtgaacaggaacttaaagccagcagaggaaagctacctgcccttcactggtggtcagtgcatggattccagagacagggtgggcaccagttcctcaccgggtcctttctagttgcatgacctggggcaggtgactttatgtggctaagcctcagcttcctgacatatggcaggagtaataatatcccttgaagccaacaaaattcaataggcacatgccatgtacatgcctgtgttatgccgggaacttcttaacatttccagaatatgtgtaatcatatttgttacatgcaatatgaaattatgtgtaaactgtccaacctgcaggaggcagtagatcaatcaattacatgtgattaatcctccccctatcttacagagaataggagagaaaatagagctccaaggtggaggaaaagacaactgagaggaggctattgtgatgttttattaccataaactgccaagggttagtcgtagccctccatctgccagctaattccggtttcattaatatgaatattctcacgcttccagaaggaaattcttggaatgttatggatctctgtagcaggcacatgcaacgtccagtgcttccctgctggtaatgtggcggttttattatgcatgccatacccatgctctctatttcctcgatagaccttatagaaatcaccatgcttccttttagaagaaaatgatggtatcacatggagaacgagctgaggagcttgacaatcttggcaaggcttatcaaaagaaaattcatgtgttagccttaagttaacactacttttattaaattcagtttttatcacagctgataacttggagatgtaagcatttagagacagaattcacttatgaatgttctaaaatgtcagaaagtttaggattctcttcaggtagtttcctttctctcacttggagtgacatgttggacccgtggcattgtcccgaggcaacgttgtggaatttttagagagtgtttgtctgttagctgtttgttttgaacatgttcacctttggctctgacctgccatcatggaaaaaaagtgtcaatgtgttgggaaagaaatgggctgcttctcttttctcctccctcctccgtctccttcccccgaccctcctccatccccttcctgcccccactcctcctgctctccagcctggcctctgtcccctctgtgttcctccccttcttccttgtatccttaatgacttccaggtgtgcctgctgggtcaggcttctggccccgtcctggggaggctgggtctgtgcctccacaaacacaagaccaaagttagggggtgggggactccagaagtacaacatcagaggaagaaaaaaaaaactttgaagttttgaggatgaaattggtaaaaataattctagatgaagatagacccgtttacattccaaggaagggaaatgttttacccaaactgtttccatggaccctgtgggttcttgttaatactgttcaaccttgtgattgaaagcccaagccctgtgatccacagcaggggccacagccagaaataattccccgagaatactgcgtgtgccttcaaatggtccttgatcatttttcttggatgccccactttccaaaggccagaaattgtttcagggagtcattccagttggggaaggttttatgttctaagagcaaggtgctgtactcataggaaaatgtgtaattcgtcatgatccttttgtgtggagaggatggcggtggtccacttctcaacttgggagtcccttagtgactcatgatgtatccttcagtacgctgcccagtgccttccccatttgacttagattttctgccacagtttaagtatcacctcctctatgaagtcttgccagacacattcctcgtctctttcctgttggaacaactgcctcactcctgtggccccactgtgccatagacaggttagagaacatgggccctggcatcagacctggcaggcagtcttgattaggcccgttattagggtgctctgggcaagtaagtttacctgtgccagggatgcacctttttaacccaacacttagaggggtcctccatgtacagccatgatcacaactctctaacgtggtcacttgcttgcacacacttgtttagatgtctctgccctgctgttaattagactgtgagtctccagagggtgagactgacatctcatttctctttgcagtcacagcagagatgcaggcccacagtagggactcaccagatgtggcagggtgagggaattgtccatagatgccttaaagatatgctatccacaggagcagagagcacagcaggctggatgccaaggagaattcgaccagggtaaggcttacaggcaatccattcactgcagagtcttcccccatccacacatataactccctttagtattgatgacctttctctcctgaaatattacagaaactgccctgaacgaagatagatggtcccccctcagcgttcacacatggttccgtctcatccaccagcttccccggccccattccctctgtctcaggaaagtaataatagtaactcataataatagttcaaaataataataatcatacctgggatttatatttcagcgtgcctcctaagagggcaaataaaccattttacacaatgcagagagaaggacagattttctttgtgctgctgctgatcacgttaagccaggagagatttacagtcaaattccagctacagaagcaaagtgttggtgccccgttggcatgtggggatccactttaatgttgttctcttggttttgcttaaactgccaagtgaattactgtaacacactttgcctgcagttaatttgacatctagtgccagagagctgctttatatttttcaaggcaagccagggtgaaatttttgcaaaaagatttgtccatcatttttactgatgtccaaacacgatgtctttagcttctttggaatcgagctgtggaagtcacgtgggctttttcttttttcttttctttttctttctttctttcttttctttttttaaggatcacagaagaaaagcaggccgatcttgttgaaatgtttttaaaatctccaaataataaaataggtttagggtgtttgcttatgaaagctgactttcaccagaatgatttatatgcatcatgggcagaggggcagtccaataaaagaggcagaaagggctcttgaaaaatgtccctgggcacttgcccgaatgactttagtgacagtatctactaaaactgatactaattctgttacgtgttatggcgcatacccaagaccctccccataaactatttgaaagaagcaaagttgtaattctccaaatacggacttgtacatttctgatcattttagcaccaacattggttcaaactctggcagccgaccacagttccagctgagctttgctgcgctgtcagcaccatggggcctgataaagcatttttggatttttcctactcacagtgcccccatggtctcaatgctgttgagaacattaagctccttacctgtgttttgtggttgttgttattgtttttctttctggtaaaggactttatctgcagtcctaacaaattgacttacgttaacattctaactcgtggctaaaccaaaaataaacttgcagaccctgccctgaaatgcacgctctgagcagtctattggatgcggtggtgtggccgatttcttggacttgctacattcttaggcaagtgacatctcccttcatttgtacagagggagttagaattgaatcgaacttccaccgcagcatccgccagctcttataatcacttgccctttgctgatggtgagtttttagctgctttctctcctaccatacagcactgacacctgagaagtccagtccttttggagttcagtagattccttgtctctggaaaatcagcagaaaacaatgcagcctcctcttgatctcccctgaactttgcaaacctctctcagcattgaccgcatgaagggtgggtgccctgaggcaggcaagccaccaggtggtaattaagaagcaagaagcgctgctcccaattctctagatctggatttagaggccagttggcttcagaaaacatctcattcacacaaaatgggacatggtcttttgtctgttaaacataagctttcaaggtgagttgtgcagaggcaagtctgcttgtttcatcaagctgacgtttatacttctgagtaagtagggggatccggagagtcttcttgtcactcaaacagtttccgtacgtcagtttcacacctctgttctgcatgtctctgttgggaaggatgctgatgtctgggatttgaaatagagatggttggacctctgactttcaacaggaggaaatcaaaattaaaggaagaatataggcgtacgcttagaaaggacctgtgaaaggaagataaatcttgggcccccaaatcactaagctaaagggaaaagtcaagctgggaactgcttagggccaacctgcctcccattctactcgaagtcacccctctgttcactgagataaatacatatcggattgcctcctttggagaggctattcagaaactcaaaagaatgcaaacatttgtctcttatctacctatgacctggaagccccctcctcatttcaagtcttcctacctttgctctgagttgtcccacctttccagaccgaacgagtgttcatcttgcatatgttgattgatgtctcatgtctccctagaatgtgtacaaccaaactgtgctctgaccactttgggcatgtgtcatcaggccctcctgaggctgtgtcacaggtgcacatcctcaaccttggcaaaataaactttctaaattagctgagacctggctcagattttcagggttcacagacctgtcaacatgaactgtcagtggtgatagcacccgttttcaagtctcattttaatcggaaggaagttttaccagctctttggctttgtagaaggtcgagttctccaaatttaagagattcaaaaatgtcctccaaagaagtttggggtgaaaacacatgacagtttcttgttcatatttggccagaaggaagcagtgtccattaggttgactctccagtgcttcttggtgttgtgataagcccgtctagcacggagggccagaaggaagcagtgtccattaggatgactctccattgcttcttggtgttgtgataagcccgtctagcacggagggccagaaggaagcagtgtccattaggatgactcttcagtgcttcttggcgttgtgattagcccgtctaacagggcgggccagaaggaagcagtgtccgttagtatgactctccagtgcttcttggctattgtgataagcccgtctagcagggaggagatgtctacacggtgttctccaaactgctcagaaaagagcagtaaggacaggatggggcccagttaagaggtatatatcttaccttctctttttctccttcttctccatctcctgcccttacttcttcctgcctgtcatttatttattcttttcacagatatttagtgagtccttgctctgtgtcaggccacagtgtagatattccagggatggaggtgaccaagcagacatggccatagtgacaggctaaggaagcacaaatcacaaatacagaagataattcctggtagtgacgggtgcctccaagcatataaaacagggtagtgagatgggaagttagagtagaaatggctcaattttgtgctggaactggctgcaccagcaggagccaatgattacccatctcccatgtttagtgacatcatgttgatagcttgatttcagccatagtgagaatattttcaccacggaaattggcacatgctacacatcagggctccctcctccccaccaaagctgatcattaaacattttctagaacatacctggaaggcatctgggaagaggtaacattgatcttaattgttattagagagaattttcaatttcagttgtagcatgaaaaatcacagagtccatttatttctcctcttcgagtcagtatatctcaaaacattttttcaacgttaatagaaatataagaagtgcctggatcagtttttgtttttgttttgtttctttttgagatagggtctcattccgttccctaggcgggactgcagtggcaccattatggtttactgcagccttgacctcccaggcccaactgatcctcctgcctcagtctcccaagtagctgggactacagggacacaccatcatgctgagctaatttttatatatatttttttacagagacaagttctcgccttattgcccaggctgatcttgaactcctgggctcaagccaccagcctgcctcagcctcccaaagagcagagattacaggcgtgagctaccacacccagccatttatctgttttttaaatagcattttggagatgacagaaaaaaaaataaaggaaagagaacgctcatagaagtttaaggttcagaagtatttggctttgaaaaaaaagtttaagggactgtttgtcatggggtctggtcttccaaatttaatgcctcattccaggtagctgcagattttatagtttctctcaaagaatgtcaatcctattgtctttccctgcttccccctcctggatgaagtctttctctacactcttttttgggaagttcccaaatctgtcagtatatattacaaaaactgttaccgcctaacacattaaatgtatttaaattatttgttctattaaaatgtcagtgtatttcttgaattttaactgtgcctgaagatcaatcattgtaacagctgcagggaaggctttatgacttacctgaacggtggtgtattctgtggctcggctaagtggattcttcgactttaatagattttactagctaggacaaaccatttgagtggcttctgttggagttttattcttgatacataccaatgatttactcagatccgttagaaaaaatagttttagggatgataaaaattatgataataatattgacaataaatagagtattcgccaatatgtatagagtgcccattatgtttcacaccctatgtcttgtgtgtggtgactcatttgaaccttatagcagccctgagggataggtgccggtttgtctctatgcgcccatgggaaactggggcacagaggtgttaagtaagtgacccaagaacacacagctggtaggagttttagccaatattccagtctcgatctgctgatatgaagccgatgcagctagccaccatgttatacccacccatagtcatgaaaataagatgagcttaatttttttcttttgagactgggtcttgctatgttaccctgggtggagtgcagtggcacagtcatagctcactgcaatcttgaactcctgggctccagtgattttcagcttactgagtagctgtgactacaggcacaggcctccatacccagctaagtttattattttttggtagagatggagtattgctatgttgcccaggcttgtcttgaactcctggcctcaaagcgatcctcctgtctcagcctcccaaagtgtggagattacaggcatgagccactgcacacagccaaggtcagctttttcacttcagcacaccaggattttcatcccagctctccaatcccccagctgtgtgggcctggtcaacctgtttagcctgtcaagacttcagtcccttcaactgatagatgggagaaattaatagcacctgcctgagaaggccagctttttgggggacccaggagttacgaatgcccagcacttctcaggtgatagctgctgcttatctccttgtacagagagaactggaacattctgaagatgaaatgggataataatgtccatgaaaagacctggcttcacgcttgcctcctgctagttccttttctactctatttcagcttcctgtttgtaacatgatttaagcactaagctattgaattttggagtgcattaaaaaaaatatcgagtggaaaaaggaatatttcttagggaggaaaaacccgacttttgactttataatattaagttcgttcatatctctcttagattcttatataaattttattgacctaatgttctgtacagtagtccttaattacagttttggtttccaaggtttcagttatacattgtcaactgtggtacaaatatattacttacaatatgatattttgagagagagagaccacatttatgtaacttttattacaatttattgttataattgttctattattgttgctcatctcttactgtgcctaatttataagtatactttattgtaggtatgtatgtataggaagaaatgaaatatatgtagggtttggaaccatctgaggctttaggcatctactgggggtcttggagtatatcccctgtgcagaagcggaggctactgtacataaatttgcctgtaagtgagcgcgttcttggattttgttgaatggtgccactgattatgggtcagagcttgttgaaagggtattaatccattatttactaaaactaattaaattttcatgtcatttctttacttattgtttttattctctatcagtgtaatttattacagcaaccaattaaagaacaattttatggttctatcagtgatgccaaaaaagcatttgctcaaattcagaagtcgtgataaagccaaccaaccaacgaaacagcaatacttgtaactaaaattgggagaaaggaaaacactttcagtagagtcaaggatttttttgttaattatttttatttttagagatggtctcactatgttgcccaggctggtctcgatctcctaggctcaagcagtcctcccatctcaacctcccaaagtgttgagattacagttatgagccaccgcatccagcccacaaatattattccaaactgtaaaatcgtgaaatgttttccattagaatcagaaactagacaagaatattcatgatagctgtcaattgtcacattattttagaagttttaacaaatacagtaagacaaaaaaagtcttaagtaatgggatgaaaccaaaatgttctttgttttaaacttctgtaattataatcctagagaagctaaaatattcagtaaaaattactagcaatgaaataatttgaagagttggctagatgtaaggtaaatatatacaaattagctggtatatactagttataatttaagatggagatagaaaaaaaccccattcaaaatattaacacaactatcagatatttaagaataaatgtataagagtgatcaaatacctgtattaaaattatataatttattgaaaggaattttttgaaagtcacccataaaatgatataattttaccataaaatatcagctaaaaagggggcagtcagcaaaagctcagctgtgaattaagattattttctaacccttagttctttgataacataaataccggtagaacttggaatatttcaagtaaagtaacatgctgtgttttatctgtattcctggtaacttgcatttttcaaggaaggaagtgtatgatatgaagtaggcttataatttagtcagatgagctcttggattatgttaccttgaatataatgcagaggagaaaacaaaaagagtcttttgcatttttatttcttatcaataggtccctttttcttggaatgtcagcctgaccctgaaggtattctcctaccagcagagccttctttgatgccccgtcttcaacctgccatgttttcccatctctgaggcttctattttagagacttttcctccagaactggcttatatcatcctgtgttgctgcatccgatcacaggtctgtggctgacctgggcagcgtagtagaagggtcttgagatttggagtcgtaacgagttttcaaaactcataactatattacagtttgcgcaagtcatttaacctatctgaagcttcatttcctctcccacacaggataaaataaggataataacagccattttagagttcgtattaatatttaagtgggagaatgcagccagtaccctgagaattaaggttcattcactcagcaagtgcttactaagcatctggtttatattatgggaagttttgagaattaggtggtcagaaaggtgtggtcctcgccttcaaggagcttacattctaggaagcgaagactactgaacaagagattttagtgctaggattggagaccccagcagaagtagcaaatactgtgtgaggtttaaggaggttggaggcaccttcgcttgtacttctacatgtgtcccttcatgtctagttcactgattttttaattgaaattttaattgaagactcacatgtagttgtaagaaataatatacaatgattcctcatattcttagctcagtttcccccagtgatagcttttgcaaaacaattgtgcaatatcacagtgttgacacttacagaatctatggatcttattcagatttctcattttacctgtactcaagtgtgtatatgtgtgtctgtgtctacatatgtagttttatacagtgtcatcaaatgtgtagcttcctttatacacaactacatcaagacagtgaacagtgcatcaccacaaaattcccttgcgttgccttgcaaaccacacccaccttccttctgcgcctgcctcatccctgacccctggcaaccactaaactgttctccacttttaaaatgttgttttttcaaaattattatataagcagaatagcatagtatgtaatcttttggggactgacttttttcactcggtacaattccgtggagattcttcccagttgttgcacgtgtcggtagcttgtttaatttcattgctcagtagtattccatggtattgtacatataagtgatcgtatgtttaatcactctcccgctgaaggaaatctagtcttggctattgaaagtaatgctattataaacatttgtacacaagtgtttgtgtaaatagaagttttcttttctctgggataaatgcccatgaatgcaattggtgggttgtagggtaatgacatgattagtttgtataagaaactgtcaagctgtttccatgctattttacatttccaccagcatttggtgatctagtttcactatatcttcaccagcatttggtggtgttgcagttttttattttagccattctggtaaacatgtagtgatatttcactgtggttttaattaaattgccctgatagctaataattttaaacatattttcatttgtttgtcatctatatatcctcttcggtgaaatgtctattaatgtttttttctcattttctatttgaattgttgtattattgttgcattttgaaaattctttatatattctagttattggttctttgttggatatgtggtttgcaaatatcttctctcaatctacagcttgtcttttcatcatctttacatggacatttgcaaaataaaagtatttagttttaatgaggtccaatttatcaatttttcctttcatcaactgagcttttgttgccaaatctaataattctttgggtaaccatatatcccaaataatttctaatatttttttcctaaaagtcatatatttttgcattttgcatgtatgcccatgataaattttgagttaatttttgtataagatgtgaggttaaggtcaagtctaataaattttgcctaggaacatctcattgttttagcaccatttgctgaaaatgatcttcctccagagaatttttttacctttattcaaaatgaattgagcatgtttgtgtgggtatctttctggcttctttattccactgatctatgtgtctgtctctctgacaattatacgctgtcttcattactatagctatgtagtaagcctcatgtcaggtagagtgattcttctcactgtattcttttttattaagattattttagcttcctaagacctgtgctttttcatataaattgtacaatatggttgtctatgtctaccagaagccttgctgcagttttaatggggtttaaatctataggtctaacattaaacctatagatcaattcgggagaattgacatctttactatgttgagtcttccagtttgtggacatggtatgtaattctatttatttagtataaacccactggagtgtgtacctaagcatttcattttctttggagcgattgtaaatggcattgtgtttttaattccaacttctacatatatctagaaatatgattgagttttgtgtgttgatcttgatcctatgagcttgctgattgcatttattataaagttccaggagttttttatttttgtttgtatttgttagtttttttgagatttcttgggattttctatctagcctgtcatgtcatatgcaaatagagaattttatttcttcctttataatatgtgtgccctttttttattgccttattgtagtggctagaacttcctgtgctatgttgaacaagagtagtgagaacatccttgccttgctcctgatcttagggagggggaagttatttaccatttcaccactaaatttgatgctagctgtaaattttttgtagatgttctttatcaagttgaagtgattcttctcaattcctaaattactaagaaacttttgaaaatgataatgggtgtgtactttttatcaactgctttttgtatgccaatctatatgatcatatgattttcctttagctttttgatatggtggactatattgattttaaatattgaaccagccttgaagacctggaataaatcccacttggtcatggcatatatgtttttttatacattgttggatacagtttgctaacattttgtggatagctcaccaacttttattcagaaaacatccgtctcagtttagtgcccaacaaggaaagcatactgtttgttgggtgggttccatttttgtggttaggagaagaatatagctcccttcctagggacggtctcaaatgagtccccatcagccaccagggagctcagctttagttgcataagaaccaatgagcatttagtttcatgtctcataaataatctgcctgcttatattttcatctgtacttctctcagctggcattctgccacagactacatttaggaccgcagccagtgggttacagcaggagaccagactccaagttctggcctcacgttgcttggtatacatcactcagttctgttggcatggatgctcctcctataccccatcagccatcttgcagtatgggtttggtggatcacacagggattcagataagagggttcagatccttctatccatcaacccacccatccacatcactgaaaaagggactctcagatgccgatgaccagtaagaccacatctgtgggcacaaaagagcccatttatgttttttatgggaacctaagaaggaaatgcttttctggtcaaatacgttcttctctgattaggcctctcattttaaggcagttgagaagactcacagatgtgattcactggcaatggctctggttcaccaagcttagctctgctcagtctacctttagcagaagattaaaaatgaaaactcttcttgttagaggtagaagagatcctttcccaaaccatagattcatggaactgtcaaagagcagcactgaactttgtactcaatgccttaatttttccagttgaggataattcacactaaacaagggatttcacctctctgactcatgcatcaggaacttggagataaagccctgttaataattcataattatatagcatagcatagggcagtttcagatgcttcaactaccaggtaggtagaataaaggaatgaagttgctgtgtatacgatgataaatggtgctaaatctatgtccccaatatagggaagacaggagaaagtgccaaagatagtgtgcatgcctcatctctaaggggcagccattattgacgtccagctgaatgttgccacgtggaaattagctataaacttgccagaacctccagtttttctggagagattagattagaaattcatatatttttaaatattaaatcatccctttttcttgagatggtgtcacgtcgttgcccaggccaccgtttatgttgtccaggccaccctggaactcctggactcaagtgactttacccctttggcctcctgggtagccgggactacaggcgtgtgtcactgcatccagcttaagttatccgatttgtaaatggtggcaatgaaatcattgcgtaggccacttggagtgagccaaataaaatacatccgcagtccagattcaacctgcaggccatcattctgctgtcactggtgtagaagactttttcagcctagtttattctaggctcttttcatttctccctgatttgaggctttgtaggacgttgcacaggaattatttcccttttaaacgttagttttcattttaccagtgcaactctgctattggcacatctatgaaatacgtaaagctatcattttaatactaaagaggaaacacaaatttgactcatttccccagaaaattcccctcctgctttccatatgttatatagttaactgtaaaagtggcaccacctcttaaacagccagctattctgatcatttgaaatctggaacattctttcctacggtggttgacttttcactgcctttgaggttctttccaagtaaaggcgttattctttgtggtgtgctcctggaggtcactaacaaaacgtctccagcaggtgttgtgtggattcccccaaatccgtaggctcttatttcctagacatgaagagtatgtgcgccttctttttggttaccctggaccagacattcctcagcactggcttgcattggcaggaggtggcagagggagaggacagtaaccaataccgctccttctacatgatcagtgttcaggttgaagacaaacagggctccaattatgttgtgatttagaaggcgacagagctgagacctcaccctctgcttatgggctgcatgcctttctcagtgaaataacgcagaatgcagaggccatgcctgcagatcaggggtgctagaggataggcaagaagtaagtggccaccctatctcgtgttgagagcatgctagtctccgaacggcctgccagggtgcctgacagccagagccacctaatgggcctatttgatcctggagttgctgtaatggcaagaaaatccatggcctccagccccagtgttgaagttttgacgctaatgtgatgataattctcttttctttgactggggacttgcctttgtttatctttttttgttgttttagccatgaaatatcacatgtaaatagccgaggatatctgggctctgagtctttaaaaggcaacagaaaggtctctgttacgaagggggaactagttttcattgtcactgtattaagcagaagttgggaatcatagaagaccttgatcttaccatatcccttgttaaatttcctctaatactattgagaagtttatcctctactttttcctgtagagtaaaagatatcgattttgtttctgtcggcactgccttggaacttgcttgcatccctcccccacgcgaggcgaggccctgaggagcgggattcgctgacccatgctggcagaacgggtgatggatgaggcagagaagggtacaggctggctggaccatgcgatggggaatgcaggtggaacaggcttcctcctgaatcaggagtggaagaggagtctggggtgaagccaaggggaagacagttaagctttaaaaaaccaactgcccagccgggcgcagtgtctcatgcctgtaatcccagcactttgggacgatgaggcgggcggatcacgaggtcaagagatccagatcattctggccaacatggtgaaaccctgtctctactaaaaaatacaaaaattagctgggcgtggtggcgtgttcctgtagtctcagctactcgggaggttgaggcaggagaatcgcttgaacccgggaggcagaggttgcagtgagccgagatcacgccactgcactccagcttggcgacagagtgagtctccatctcaaagaaaaaaaaaaaaaaacaaaaacctgccctgcccagccatgcccaaacagagtggccagcagtcagcttagtgtgggcagagctcagggaattattctgcagtgcagctaacatctagcaccttctttgtgtcaggtgggccagcactggggtggaggccgagacagcttgtgagctcactccctgggagatagaacggagtacccagttgcactgagggaagagcagggatagaagtgggctccgggtctaggagacggtggaaagagaggactgctcctagcgtgagagtgtcagggaagcttgctgggggaaatacaaggaaggaagagaatgcaggcagctcaaaagagccgggcaaggagacctgcagagcgagcggaggcctggtttctgtgaagcacagggcaggaaaatccaaactcacttgagtacacgctcagggtcatgggcttgctatatttttcattcaaccgccaagaaatcttgagaggcagctttatcatctccatgtgaggaggaggagattcaggcccagcgtagtggcttgcgaaaagattccagcactaaagtttgaccccagtcctacctgacttcctttctccagctgtgagactcccctgtacaatttttctggagggtctagagtcacatgagtcacgccaagccgccctttcagtgcgaaggaatccaagcagagccctcctctgctgtgggtacttacttagggaactgtggaggtgtcctcaggtagccactggtgtgtggggtcataccaagtcatttggtttacatcgggaatgccttttgtcgttatgtctagacccctggagaacagcccacggcaatgcacttgtggaaattcggactgtggattacactgagtaacaatcctaataatacctgcacacaatcagttgcctgtccaaaaagcaataaagaacctctagattttgtggtcaccatattaatcataaattggggatcatagaaggccttaatctcattgtacatacttttctattcctcccagtaccatttaaaggttagtgaaagcaacctttagtatcatctgttttttggggggggttttttgttgttgttgtttagctgtttatgggtaggagaatgcgtgctcttttagggacatctcttcaaataagaacaggttgtaacctacactcaaaagagatgctcttggcaaggtatggcccctaaggtttgaaagcgttttccaggcctgctgtcaggccaggctggactgtccacaatttcttgtcctgcctcccgtgatgctagccatggatgcaccccagaagcatttagaatttgggagaaaaaggagcaaggcatactgcccaaatccaaaacaactttggctccctttggcctccattctaacatgctgagtggatgcatcatggatagtcttttaaaaacaagttctcatctattcaatgtcagagccctaaatggtatgaaaaataggcaacttgggtcatgccactacagatcgacacccactaaatccttttaatttagtctagtgcaacaagtatttgtgtaagtgtcctctgccctggacaccggtgaggtcaccgtgggaatggctgggcaggaacaaagccttttgtttccagctgagtttccttttctgaagattgcctgtcctagacaccagttctctgttctctgtgactctgattcctgtctcctcttctttcactctcatccattttcaatactggcccctcatttcacttcctcagctaaatctacctctcaaagatagacatggacatataaataattttttaaaatcctcttttgcaaaaaaaaaaaaaaaaagaggtgaatttagttgaaaggatatagccactcttttctgaagtgatggggatattcgatggcaattttgtgttttcttcacttggaaaaactaaaaagtttgcaacatttaaaaaaaatacaacccttatgctgatggatgtacactgtaaaacaaccacgtttggtaaactgttaatcactttcatagtgtatgtggatggagccagttaaaccagttttcatgtcttttgggtccttttgagtctgaagataaccattttttaggtcctcatgaacctctgagcatgaaccatgaaattcctattacacctgtgcttttataaacttgatccaaggtttaggctctcagtgcctgtttcctgtttaatacatatcatggttttggaaaaaatgaaagaaagaaagaagaggaagagctgtcattcctctgacaagtattttcagtggaattagggtcatgatgtcatgcttatttcaaaagatagcttcatctgtgccttcacccagacttagggttctagattcttctagattctacagcaggcactggcaagcttttgcttaagaaggcaagccgggaatggtggctcacgcctgtaatcccagcactttgggaggccgaggcaggcagatcatgaagtcaagagatggaaaccattctggccaacatggtgaaaccccatctctcctaaaaatacaaaaattagctgggcatggtggcgtgtgcctgtagttccagctactcgggaggccgaggcaggagaatcacttgaaccagggaggaagaggttgcagtgagctgagatcacgccattgcactccagcctggcgacagagggagactctgtttcaacaacaacaacaaaaaaggtgggggggtgggcagagagtaaaatattttagactttgaagtctaagagacaaaattgaggttattatgtaggtattcatatagcatttaaaatgtaatcattttaaaatgtagaaatcacttttagatcgtagaccataaaaaaacagcaggaaaaactacatggttggctggatttggccaagttgacatagagagccaatccctcatctccagcagggcttttactcaatgatacagtgcgcatgaattgcttgggggattgtgtacaaagtgcagatttggttataggaggtcagggaggggcctcaattctacattcctaagaagctcctaacaggctgataatccatggatcgcattttgaatagaaaggattatgcaaaaagccagagtttttttttcccttgtcttataccagtggtgcctagcatggtgtcaggtttatagaggactaatacatataagaaggagaaagggagggaggaggaattccagttgttttttttttaatctaggtacaagtctctctgttgatttctaaacatcgaatgaagatgaaggaaatacttaaagcacctaagcactcataactcacttagtcatttcactattaaaagagaaaaatagttagtttacaatttccaggaaatcagacaggtcaccaccacctcttcaacgactggaatttgcacagtctcactactcataggcccatctgttactactaacagtgctaatgtgattgtctgtaggtctagcaattggaggttgttcgtttctttgagacaaggtctcactctgttgcccaggctggagtgcagtggtacaatttcagctcactgcaacctttgcatcctgggctcaagcaatcctcccacgtcaacctccagaatagctaagacccaggtgcgcaccaacacacttggctaatttttgtgcattttgtagagatggggttttgccatgctgctcaagctattctcgaactcctgacctcaagtgattcacccgcctcagcctcccaaagtgctgggataacaggcgtgagccaccgctcccagcaacaattgcagtttttaaaggcagaaaatattacacaggtgggttcaaatttgccacaccaagtagaaggtgttggaaggaaaattaggaattcttaagcttcagaagattagtagtcagagttaaaaaccagacaattaacaagttaaaaaaaaattgtgaagcacacacagctgttatcttccagaaacactgcttacagaggtaattgctcacagattttagggtttacagcaggtatcacaggatttcaaatttaagaggggggtgggggcctgtgttcaaagtcttaagaatatccaagggatgtatgatgtatgcataattacctgaaattgaaactactgtagtttaaacacttgctgaaagaagaccttttatttcatcttctctacaggctgaaggaaagaaaaaacaaaactaacaactaacagaaaaacttttcatgtcgaatatgtagatttacaatatgtgaattatcatcagaagaatgaggttctttgatgattgttgcagataccctgaagaactggcccttgttgtagaagaatggcacagggcacatggtaaaatggccctggccattcctttagacattttgtttgtacttatattaacttgagagaaagtattaggaaaaacagagtaattctgtagaaatattcctgatgatacactaggcaaagcagggagaagagaaaaagtgagcaagaaattgtgactatgaattccaaaccagtttggctggatgagccaaaaagacaaaacaagagcattcaagagtctgtcaggaagtggtggcctttagttcattttagtagcaagaaaactgatctttttctgattttaagaactataccatctctattctgggcttcactcttagctctcacagttagaaaacagtgagccttggtcaagtctcataaactgtgtctcagttttttcatttatacaatggccaaaaaaaaaaaaaagaaagaaaccacaaaaccataccttctttgcagggttgtgtaaaggaaggttgaactagaataggttgaagtcaatcacatctctaaggcatttggcatgtagtggaacctcagtaatcagtagtttttattatttggtgcacgatgaaactggctatctggagatgttttaaaatacaggttttattattatttaggtatgctaagaccagcagatcaggagacaatgaccactgaaaagacagtttgtgagagttgtgatgattgtgatctgtgtcctttacagtttgcaagggaaggggacatgctatgtcagagtggagggacatggggaggcaccaggactggtcaagaggcagagggagagggtcaaaccgtgggttctgtggggaggactgaacgaggcagggtaagtagactagggtttgagtaagttcagcaggctctggggaagaggggctgtccctatttttctggtacctggccctgggtgattagaaagggtggatggtggcctggggcatgagaaataaaggaggtggtggggtgtaagttctggattggttgggttgcattcaaaaggggtgcccccaagtgagttgtttgctgcctctaggaatttattgaccctgggaggggagatcccagatgtcaaagcatgggaggacagaaaagaaacagcatggttcccacaagagagaagtagacagagacctctggaagtttaaaaatatatatgttgggatttcatagatgaggtgagcaaaaaattggccgggaagaactattaaggaggagatgatcagaaacattttcaaaatacctggaacaaacaaagaaccacatttcaagaaaaagacagagaaacaagactagcaaatagagttttcaggtggaaaaatcacacgttggacaggagactgaaggtaagggaaaccaagtcaggctttaacaccattctgaattgcagctgcaggatcacttgctttagatggaatcacccagcggatggcgtttaactctgctttaaaccccttcatggcttcccaccacacttacaaatacaactccttatcctgtcagcaggggcttgcttaatctgaccctttccacatatgctggatcacttcacgcctccctgttctttcaattccttgaacacaccaagttcctgcattcccgcctcagggccttcaccttcagcctctctgtccccacctgctatcctccccagctttgcacacctgattgctttttgtaagtcagatctcagattaattgtcgcctttacagacagatttttcttaactctccagtctaaagaagccacctcctccagttctcagcactgtgcttctcactctcgtttattttgttgtttattcatttgcttgtcatctgtattttcccactagaactcaagtttgtgacaacaaggacctaggtcattttcactgctgtagtcccagttcctacaacagtgcccaggacacaccaggaacgtgacatttattgaatagatgaaagaacagtgtaaaaaccacattgctcttcactctgcctgcagccaactcaagaacaatttcctaaagcagctctgaaaattacgaaagaaatagtgcatggattccagccccagtaggcttctgggcttggtgtttctttaatttcatgtaaatttctctaagtaaatatgccttaaaagtgaataaaattttatttcgctttaacaagagaatataaaagttaaaaaggtcactgtagtaatagactaatctcaattaccagggcagcctctgaaaccctcactcccacctaatctcattcggtgcatacgcagctcaccgtgtgatttccaacacagctaaatgaaattataaagcagtgttaaatttattaatcatttaattagctaaatgttcctgcaagtactggctagatgaatggcatgtcattttctaatgcaatttgcctctcaggcagccagggtcagaaagggaagctcctggcatctcgaatgagctctttatatcacaccttctactgggagacggttgttataccactgattatatttgagacttgtacacaagaccagggcactcagatgctggaattggaaaatgctctctttcttacctgggttacaaagaggaggctcagggtagctgatgagtcccccagagattgtctctccccgtgtccccttgcaggacaaatcttttcatatttaacaagccactgagcagaacagggggaaagatagcaggcagtattaaacgcatgctcaatctagttttatttcttcaaatttactcagtcgagaaaaatttgtggagtgcgaattctcctcatgctaggtgactttctaatccttctagttgagtcaggatttatttctccattctcgccttctagcctgggcttgtcagcttggggtgtatgccgcacctcctctttgaagaggatcttcatttggaggggtgatctgactcccaaccctccccaggtgaaagcaccgggattcatacctagggggctttgggatttggggctgactttgacccgtcattatttctgactgcaaaattcctgacaaatgtctgctgctgggtgctctgtgaatctgttcccatttgcagtgagagtgctggcatcaagcacattgtctaaattcactcggcaagaagccgttggagtgggtgccacgtgaggccgagaacatccaaatgaacactggtctgtttgttcaagatgggagctgtcagttgtgagagctcctatgggaagagtgttttgatgtatagacatccctggtccacagagccaccaagcaaggcagactatttcgtgagaaagaaggaagatagactccatgcaacacagtgggtgtggcaccaagcgggaggtggagggttgctacctagtcccggctccacctactgtcacctgcattcccctagacaaatcacagcacctcaggatccttgatctcatcatctgtaaaacagagatcagatgaaccctcgatattaatatcaataagagccgatcataggactgctctaaggattaaatacaatgatgtaacctacttgaaagtgtcatataaattctgaggtgaagtggaggcattatggatgcattttattttgttttattttatttcatttattctttttttgaagaggtatgggtcaagcagatctgcagcccacactcggctcactgatcacgtcccatacaatcttggcagatacttagctgaattccatcgatttagtgataaaatgggaacagtagtaatggtgcagattagagaaaaaaatgtgatttgtgcattcatatgtctgtgtgtacatatatgtatatgttctgtgtatatgtagacatgtatagatgcatgtgtgtacgtatacacgcacacatacataaattgtgtacatacacatatacatatacacatacaatacatatattctgatacacatatgtacatatatgtgtatacatgctatatataatgtagcacgtttcctggcaccttgtttggttcaataatgttgctgggattatactacaatttccattactctgactatggcaacactgctgatataggagatcacttttccgcacaaacacctctaggtattgtttaacacagacctcatgaaataggtttgccatggattagataaggcaattctggactcacttccaggatagaaggcaaagacaagtaccaatatatttggtaaaaatatgacatgacatttgagtgcacacaggcaagtgaaggtggtttcaaatcctccctctgtcttttcccagctaaatgaccttgtgctggctcctcacctcctaagcctcagcttatctctaggatggacgtcattgtactcccttcatcccacctaaggttgttgttaaggatgaaatgaaaagtccacagcataagcttgacacataaaataagcacccgatgaatactgactaaagagagaggaggagtaggggagagaaggagagaagagaggaaatgaaaatgtttctgaataagttatgtctaagttttttcactttttattttttattgttttcaggacagggtcttgttccattgcccaggctggagtgcagtggcgtgatcttggctcactgtagctgctgtctcccggattcaagcgattcccctgcctcagcttcccgagtagctgggattacacccaccaccatgcccggctagtttttgtatttttagtagagatggggtttcaccatgttggccaggctggtctcaaactcgtgacctcaagcaatccacccgccttggcctgccaaagtgctgggattacagacatgagccacctcacgtggttgagattttttcactttaagaaatgctttttctgtcacctccctggactgtcttggatttgtttctttgaggggaaatatgaggctttaattttccctcccaggccttggaaaggccaagagaagcctggagataggaatccacctacacagagtgtctcagtaaattggcagtggccaggaccagaaccaggacacctgtctcccagatctgtccttttcttggatagcttgaagttacgggtagttattgaattggtcactggctaccccctgaatcattacctgattttttactgagtgttcctacctgtgagtaaagggtgcctggttttgcacaagtgttttcttggcccaagagatatttttatatttgcctttgggttgatgagatgctggtatgtatcattcgttcagccattctttcagtaagtcatcacggaagtctgcctctgtgacagattctggggctctaaggcggaatttacttcttcaaagtacagtttcctgccttgcaagtttggagttaaggccacgcagaccagagttacgtgcacaggttgtaatactctctcttgtccctggttgcctgattcaagttaggggcttcttctggattccgtaggtaggatgctgactctcagctgtcctgatgccactggtgttcctctagtaggcaacattgatggtaaacatagaaagtcatggaaggcctcagttacctctagccctgaagacacagggatacccttggggcggagaccttagggacaggacaataaagatcaggccttgggagatgcaaacagtttgcccttggaccatgtcttctgctttcatccttatgctctcaacagatcatgccaaggtcctgtgttcaccgccttcctgagtccccattcagaggctcaagaattgagacaaaagggcatcctgcaaatttgctgccctggaagctgtgctgggggagccagtagagacttcaggtggatctggaggtccttccccaaccttctgcaaaccatgtcttcccagagagcttctaagccaaagcaaaggtgttgctctctgcctcctgttgctctgtaattcatctcagcaaccatctttcccatctctgggaagagaatgttgtcccccagaaaaagtccttatggatagatttagttattgcttatggtttagagaaagcgcctttcaacagtcacatgcaagtattctttcaggcatttatccaaacacacaggatgaggcctctttgtcaaaccagtgtttgttgacaagcgacatttgtgtgcaggagatggctcattgtgtgtgtttacttggagctgttatatatgctgggggagacactgtgtatacaaacctaggagggagagattgggaggagggaagaaagtgaggaataggcttagtgagaaagagaccagagaaagagaaaagaaataaacattagcagggtggttaaacatccaagcattgaaaactgcgtggtggagctatgtactaactggggggtcttgaggaagcccattagtctccctgagcctcagtttagtagaagtaggaatcgtcattaaggcgcctaatttatgaagttactctgagctctataagagataagcatacagaaaactttggacagtgccttgcacacagtcagtaatcaatgcatattcatcatgatgttagagaaaggccgggcatggtggctcacacctgtaatcccagcactttgggaggccgaagggggtggatcacctgaagccaggagttcaagactagcctgcccaaaatggagaaacgccatctctactaaacatacaaaattagcctggcatagtggtgcatgcctgtaatcccagccacttttgaggctgaggcaggagaatcactggaactgggaggcggaggttgcagtgagctgagatcgtgccattgcactctggcctgggcaacgagcaaaactccacctcaaaaaaaaaaaaaaaaaaaaaagagagagagaataaggtcagagggggaaaagagagaaagtgaaagcaacagtaaggaagagaattggaaaaaaaaaaaaaggaactgatctggctgtatctgtcgagttgcttctgccgtttctagcccagcccacggttttccctctgcagggtgtctgtgggcatggtttgcaaataaacagtgagaagtataagctaaacatagactttaggcatatacataataggcaggcgtgatcgcgttcacccattcagtttgccatataaaagcttttcctcggtgccactttatggcccagaaacaaggctacaaaaactttaatactgctttttattttatagaaaaatataaatcaatactttcatgtctgtttgacgtgtttgggagctacagcaattgaggcttgccagtgtctggatgccccaccactaccacgccacttagctcagagtttgtttttttccttccaccatgtgaaatgttgctggttaaccagttaaaacggggagatggccatgattgcttttagattgccacttccacattgagtgaattttataataagaagccattttttccccgacaggctgcccttgtgcccgcctctctgactttgaggtcctcattattgtgggtttaaatgaaggatgttcattcaggcagggatggggggatggggggaggccaccaggcatcagcgctgttatcaggaccttctatcaggccaagtgacaggcgtccagagcaagaatgcagagctcatggtggagacctccggctgacaccaaaggtgactcccctcactctaaccttgaaagggaaagttcccactttattaaaatgaatttcgaaagggccgctctgacagctgcataattaaatactggagtgtcagcgataatttattccactcgcatgtggtggtcagatccttttcactagagggtcagcaaactcagtgacagaggcaaggagacaagggattcagggccctttgtcatttatgtagcaccagccctgaaatcggagactcataaaacctacaaatacacacacaaacacaaaccaggcaaacccacacaccacagagaagaggcaaagtgtgcataaagataccctgttgttattcacccagtacaactctctaattcatgtataaacagtaagtgtaaaatgttccacacccttatgtatagacttttaacctctatttgagggtctctgggaggaccatagttgtttctgaagtatcacttatcctacgttccatgtaagatctctttcctagggtaaacttgatatggaaggtcttcacagattaaaacgaaggaaaaaaaaaaaaaaaactagataaatctccctggacatgaacttttgtagaagtagttacaatgctagtgacctcatatactcatggtaacggcttccggcatccaatgaccttgccattgcggaggtcaatttcatgtgtgtgtgcacacatgggtgcgtatatgttacagagggaaacttgcctgtttgaagcaggtgtcgtggaaacaacatgggctttagagccagacatggaatcctttcttatgattaatgcagctaaatttcccactgcagccggtagcatattgcttcataaatgtctataaaaaaatacgaaaaatagaatcagagcaaattcagcatagacctccttgggatgtttattctttgtttatgttggtgttttgttttgtgttgtttcagctggggtgcagttgtattctgttccctctttgctagttcagaggcagtgaaagcgtgcttctcaggactcattgtccagaagattctgcctacagctggttttacgcagagaagtagcacacaaacccagtccatgatttcttatttgactctgtcctgtttactctgtcagggtgaaaagcacaggccaagctcggctagtcaaagcattactttgtcacaggcaggcttggcttctccgagtcagcctgaacaaattacatccctcactcggtcgccgaaccgggaacagggttataactcagtctaagcacccgtccctcttctattaccttcataaccaaggtcatactaatcaactcaattaccagccctctcagacattttcataatgttttctggtagttgctctcctgtgaaaatctttcggtctaagcaaattaatgtcattttcataactatctgcatttcaggtacagtgatctcctttaaaaaggctgcgtcccagcagcatagaccagctttacctcccagcgtagtcttcagacaagttggggtattgccgaagtccattcttgactttttttaatagtgcaaacaaatcatcttgtttttaggaaaacatgaaattataaagaaattgacttcaatcacttctggaggcagagcactgagttgcctccccacctcattcccctcactcccaactcagcaacctgggtgtttcagccagggcttttccaggccttaatttctctgacacaggaggatggaattacattatttccaccacaaagattgtgttttaaatccttcttagtttgcagcttttcttcccttttgcctcctctttagttcattccaatgataaatcctccctcctttgtcacagagccactgtgtactttcatagaccatcctatttttcaacgagagttcagaaccacaccatacgggcagtagtccgcattttcaacatttcctaacagcacaattgttaggtagctaacaattgaattgactatgtcaggtagacttatttttcgagttgtgctggttaactgcaatccaagtttaggaagcaaactaccaatttcatttaatagaatgagctaaccaaggcacatggtgactactgtccctcaagaccgctgaactaccacttccagcacctgctcagattattcattacaatgaagctctttaacactgtgtttgcattctttagtatatatcttgttaatagtaggccctgaataaagaccagttgaacaaataaactatttttccatgtattaattctttagtgaacttgcttatttgttcagaagagacattaagctaagtatacaacactcggtaaatttcaacttcatcatatatataataattatttttttttgagacagagccttgctgtgtcatccaggctggagtgcatggcctgatctctactctctgcaacctccacctcccaggttcaaacaattctcatgcgtcagcctcctgagtagctgtgattacaggtgtgtgctaccacggccggctaatttttttgtattttattagagacggggttttgccatgttggccaagctgatctggaactcatgtgctcgagcaatccacccacctcggcctcccaaaatgctgggataacaggcatgaaccaccatgcccggccatcagaaatattttatttcactattttaaaaaattagcaaagaagcaaatatgacaaaatgctaacaattccaaaatgctaataacttctgagtggtgagtataagtgtgattattatattattcttagtatttggtttttttctgtagtgtgtagtttccctccatgacactgagggctcagatggctctgaccttggagacagggagacatttagtgaaggaatgggaggtaaggagctggcatctctggtgtgtccatcatgcactgacctgcactagatgttttgcttccagagtctcctggaatgctccatggcctccacgcatcgtaattcccatcagcttaaggcagcgaagcgaatgcccacagtgcccaagtcacttgcccaaggttatccaagtcaaataagacagagatgagattcaaattcaggccacaatgacttcaaaaacccttgtatccttgttttgtttcgtttccctgcaaacattgttttagttgagatgaaattcacgtaatatacagttaaccattttaaagtgtacacttcagtggcatttagtgaactcagtgttatgccaccgtcacctctttttagtttcaaaactttgtcatcaccccagaaaagcatacacataaagtcatcactgccccattcccttcttccaacttctctgcttttggtctctgtggatttgcctattctgggtataccacataaaaggaatcaaagaatatgtgaccttttgtgtctagctccgttcacttagcatgctgtttccaaggcttgtctaagttgtggcatgtgtcagtactttattcttttttatggctgcatagtattccactgcatggatataccacatcttgtttatctgttcatccattgatggacatttgggttgtttccgccttctaggtataatgacttgtgttgccataaacatttgtatacaagtttctgtgtggacatgttctcacttttcttgggtatatacttaggggtggaattgctgggtcatatgatcagtctaggtttaactttttgatgaactgacaaactgctatccacagtggctgcctgtaccattttacagaaaatctctgcttttaatacttctggatgtgttctaaggcactaggcttttcattaagttcatttctgcagaaagagttaaggagtgttctcaggtaactataatcaacccccagggacttactcaagttgtgcatgtgcaactgaaatatctggcaggcatccagtccctgttatttcagtctctccccgcctccctgcccacacctctgaagctccatattacccaggaagggacaatggggggcctagaaatgtggagggaggcaagagagtgataattatgccatctacacttgtcgactagaatttccaggtactttcacctctaggctcttacctggcttttgtgaagcccctcagggaagaggaggaaagctgggcaagggggaggggtaaaccaagtcccaggaaagtcattccagtttcccaagatcccggagcttgtttgtatccagctgagatccagttgagaccagaattcactctctccacacctccatcagctgtggcctcgagttccttaacattttttaaaacaaaaaacttttgcatgggaaaaatccctttagaaagttaaaggttttccttatacaaactatctcactttgaaaactggcccactgtaaaaatcttgattccggagcttccttaaaaatcttttcacccctttaaagtgaaagttatggagaatctattagatacaaattaatacgggcaaggcgtgtgctagctgttttataaacatgatcccacttaatcctccacttcacaattctgaaaagtcaacaaatttggcccatggtagagaggaggaaaccaagacttgaaacattaaataacatgtccaaagtctcccatttcagagacaggggcatttggctccaggtttttctgactctagacagtagtttgtttttagcacatcaaatgtctgagacttgtgatgtgttagaaagcacaaaggactttgatcacaagatcaagccccagagggccatgactgcataaaccacaacaactgcgtggctgcctgtcacgtcttcatctgcaagttggaggaacttggagaaatgcagtgcttccctgcagctgcagagggtctcactgagcactattcttggaattcttaaaagctgggcctgtaagccttttttgcatttcctttcagccacctcctggctgtccttttaaagccagggtaaagtccccagcacccagaatcaaggatggggaagaggaattttgagaatgtgcttcctgcttcacacaaatagctaaagacagaaatgatggcacaagccctaaccaacaactaggaaggtaggttgtccaagacaaattgcagtttagaatggacctgccaaatgggtgggtgggcaggatggctgggatcgccagtgcccaaccttgccacagcctccttttgtcactctagggactacccttttcctccccagacgtttttcctgactctaaatagtgggaaaagtctggtttgagattgctgtattgcagggaagttcttacagcgggcttgatgggcccagaaatcaagatggaaaaaaacaaccctctatgttgatggccatgcacagtggctcagcagaactggctctgttgaccaggcttgggtgctctcctgcagggcattgcaatctttaggacaccttcattacccctcctaaaaggagattttataatgagcgccaaccagctcaaacaagttaggatctcctaacatgtctggtgaaaatacaggagtatttttcatcatctctggaaaagttgctatcatgtccttcaataacccagtctaaccatgtttttccagtggaaatgattcccggtagaatgtcctatgttccttttgcacatttctccttacaaacatcatctcatttaatcctcaccacaaaactgatagtgtcatctccaatttatagttgaggaaatagaggatcagagaagctacgtgatctatgcaaggtcccccagctaggaagtagcaaagatggaatttgacccaggtctgactccagaagcactttcctcttttgcctcctaatacattttcttatagggagcatcctgcaatacaactgttaagaccacttaatgttatctttggattaaaaatggtaccactctcataaatcaatgagtttcataccctaaattatgccagattaagaaaatgaaatctgactgtaaattacttctctaggagcaaatgattgcttgattctattgtagaaaataaaaattttttacttaaaccacacaaattaaaaaatggaactcactttcacagtcaagagttacttctatttttttttacagtaaatgcgctctttaagatgttgcaagctcaattcatgatttttttttctttttctgtatgtttctaaatttagaagttacatttacaaggaggtaatttgcaaggtcatccttttttaaagaaatttaagcaggagatgaggtctttccaggtttgagggtgatagctcgtgattcttcatcaactttggccaaaccttcgtggattcctgtgtgctgattattagtgccttgcctacaaatttttaatacattgacttatctaaatattcctgcatgcacactccccaatctaagaaaaatgtgagatgttgggaaatgtttccaagaatagaccaaaggattagtcagcctagagaagtgaactttaagaggaactatgtttattcagtggtgattatttgctgacccagtgctaggcacgtgagagtgagagggatggaatgcttgcaggagttgccttggatatcacacactgacttgggagacacacatagcgacagataattacaacatagggacacccggggaaaatgtagacgaggtttaggggttgctcagaggaggaattaactctataaggaagtattctgataatggctttcaattataggacatatctaataacatgattacatactctcttaatagtgtagcactatagttgttatttatttcccacactgaacaaatataattatcatatacaccctttccattattagctctctccatttttaatgaaaacagtggttggtggtttataagaagttttttgtcggtgtcatctttcacatcagtttgctacccagaatttaaacattccttttttgctgctgttttaatttgaaataagaatggtagcccccaggtcccctaacagtgggtgctgatttcacagtgggcttacaaatgctcttcaagagtatctcagtgttgagtccagccacccaagggagactggttcttcactgtgcatcatggccttttaatgccattttgcttttttatcatccaatcagcagatgttctttcttcattcacgttgaaagcacttcgctatggaaacgagtaaagttcattgtcttattttttgtttgttttgttttctgatgtcctgacagcagaatcaatcttcggaatccttttcaataaaaaaaaaaattaccaaaacaaatatgatcacagaagcttttaaaatctgaaatcccaggaagctaattagtgcatccttttaagatggcttcctgcatttcgatatacgcataagcttgggtttcagatgcagttggcagtttgccatgagtcagacaggtcatcctgactctcaggaacacggagctcctgcagaagcctgtggagcgagggcaagttgggatcctcccctgtgttagcacgtgactgtcctctgtcaccatgtagcaggtggaggccaggaactacattttcttgggttcctggtggttagttgtacgccccatgaacttctctcatttccttaattatatccaaaataatgcccttgttttatttccccacttggcactgagccttagggagcaggaactgtgtatatcccacagctttgcatggcacttggcacgtaggaatgtattaaatgcagctgctttcgtgcaggaagcgcggacttcagatttggtcaaagatccatgatttcagagcaggcagcccttttaaacctgtatctgagtcacttcaatgccttgtgtttctgctctgggctgcaaactcaagagcagcaaccacttatcttggtacctgtagtcccgagccctgtgtctggctcagagtaggccctacataaatgtttgctcctcctcactgagtggctgcatgaattgcatccagcatgtctactctgggaaagaacctgtggagcctctttaggagtgtgtttttgccctccctcggaatctggtgatctcactaccaatggcaaagacaaactgtgaggtgtttttttgtttgtgtgcacgcgcacgtatgtgtgtgtgtaaaaaggccatggaaatataaaattgtaacctaaatgccttcacggccagttatggtggctcacgcctgtaattccagcactctgggaggccaagatgagaggatcacttgagcctagaagtttgagaccagtcagggcaatatagactacctgcaaaaagaaaaaaaaaaaaatgccaggtgtagtggtgtgcgcctgtagtcccagctactcagggggctgaggcaggaagattgcttgagcctgggacgtcaaggctgcagtgaaccatgatggtgccactgcactccaggctgtgtgacagagcaagaccccatctctaaataagtaaataaatgcctctgtgaatccatttcattgcattggaaagacctccaggattctctgcagaagaatctttcccaacataaaatccattgttaatcacatttgacacacatgtgtgcccatgtctctgggcctgtgtccataggcatctacgtcactgcagagtgaaccctttcggttcacatcacctgctcccctcctgggcctcctgaggggtgtgagagtggcacattccacaggaagggaaccctgcatgtccatgtgccatgtgccatgtgccatcttagagacgtaaaaacactttgtatgtttggggtacaactcagtaacccattggtgcagatatgtgattcttaggatggcccacatgggtctctttcacacacccacgtgcatgacccaagtgagcaaacaggcagagactgggaccagaagctcactgtggttctaagcaagcagttgaactggtggcttctgatggcctgagaagcagtttcccttgataagtcttcagccacacaaaaagagactgtagctcacaacactcacagtcaaagccactggaaataactatttcctatcaaataaagcctttctcttgaaaaatttgaagaaaaaaaaaaaacccacctagtgaaaccttagaatcaacctgaaggttcaacagcaggtgaatgattccataaatcatagtatattcacttaatggaatactaggtagccactaaaataaaatgacagttggaaaaaatacttatgataaaaggtttaatgacaaagtggggttcaaaatgagagatactctctgactagaactatattaaaagaaagatggatgggggagaggacggtgggtgatatattatctacatagatactttttttcacttttcaaagtgtttaatgtgttgcacagcctttagaatttgaaaatgtctaacttaaaatgcctccctagtgaaatctgtggcagcttataaactggcaggatactgtattttcaagatacgcaattgtaagtggtgctcacatacagtcagaatgtttatttgaccttgatcttgtgagggcttggttcccatggctttgtagagtgaaaggtcctgagaggcaggttagtgacgataccgggacacgtattgtagacaggttgataaagcaagcttccctcagcccagttttcagtggcaaatgcctcttggccaccaatgctgtacactttgtttctgtttccttacctgtcaggcagttactgaaaaattatcttttcccccaaatacaataattagtgccttggccagacaagttacagcaaatccttcaagattaagaagggactagccgggtgtggtggctcacgcctgtaatcccagctctttgggaggctgaggcaggtggatcacctgaggtcaggagtttgagattagcttgaccaacatagtgaaaccccgtctctactaaaaatacaaaaattagccaggcgtggtggcgcatgcctataatcccagctactctgggcctgaggcaggaaaatcacttgaacctgggagacagaggtttcagtgagccgagatcgcaccattgcactccagcctgggcaacaagagtgaaactccatctcaaaaacaaaaattaagagggactgatgtccagtgaatttctatgtccgccctaagcactgaggtgaaatgaagcctagatggttcttttagaatatgagtgagcagtactcatggttaattttagaagctaataagtatatatttgataactttaacagaaatattaatactaattaagagtaaaaagatgatgaataaagtagcttcacttattgagcctttactagatgccatcttgcataaatggttgtcattttgcaaaatgtattccatctaatattagcagtaaccctgaggacttggtattcttacctggatgtgtcttatatcaacatgcacgcgttctctccctcagcataccgtgtcttattaacttctaacctccctctcattatcccaccaatctctgccagtacaaccacatcaactgtgcagatcacttctctagtgtttgggatttggggcaacctactgggtctagctatgaccccataaaagttgaacaactctgccttaatggcgctaatttttaatatgcctcattctagttgcttgaattgaacgaaggcatttgaaaattgctgaagtgcttctcagtgatgaaatgttacagatcagtttgaaatccaactttattcaacataagaaagcctatatactctggagcttaaagactgaccttttcacttactgtaaggtatctaagacttctgggtgtgggttttaaatatattttggatgagctttgttcatgtttacacatggccaccaggtcggccacaaagctgtggctctggtcagtctgactctctttagcaggaatcacgtgacaatctgtgtctgtgattagctccgtggatattactaggtagatttctcacttgtccttgttttgatcttcattcctgggtgaaagaatcccagggagtggaaaatgtaggtagttcatagggctcctgaccttccatggactgtgtctaactcagctgtgatgaggacgtgctctgattctgatgaaggatgttagcattagaggcaggcctgtgtgcctgttctgtgtcctggcaccgatgtttaacaaaaaagatcctttcagagttactcatacgacttacacattcccatgggagctccaactctgtttggtcccaatgtgccctttttgtctcactccttcctcccacacatcctgctccccactcccctaattactcatgattgcactaacagccacatcctttcacacctctgagcttttggtcatgctgtaatctctacctgagttccattcctgcctccacccttgcctgtcaaattccttagcttcatgcctttgaattttagcagaaatgttacctgctctatgaaactggattttccctttgtctccattccctaagctgcacattagagcagctgttacagtttgaagtgacccctatatggattgtttgcacacctgtgttgcaaatgtattagttaggataggctgagctacagtaagaaatagcccccaaaatgcattatagctgaaacccccaaagggggatttctaacacagaaagcaacataagtgggtagtcctggccaatggcagctacgttccacaaagtgactcagggatccaggctgcagccacttagtggttccattctccctgctgatatctgcatccagtcatctggtatttcttaccagccttaacctcattctattggtaagcactagtcacatggctatctcccactgaaaagtaggatgtcaaatatcctctagccctttgctcaggaagaagagcaaatggatttttgttaagaagctggcagtctgtcacaggagctacttgaggatacacacagttttctccccattagcatctgcagtctctggtataaacttgagtcttctctttggtccctgataaatatacatagaatgtatggatgtgagaaagttaaactgatgtctgtgtgtcttcatgtcattaaactttgaatctatggacatgtctttttctttctggcatagtttggaggtcttcattttatgatagaatacaaaacaccgagggctttaaggaggcatagtggtatgttcagctgtattttctcataatatagagtcataggaaacctgagccttggcatttgtaaggcaaaaagacccctggaaaagagtaatatagtaattcatctttatttgaaaagtatatcatcatccatttatttccccactggcataatccaggccgactttggctccccttcctgtgaaatgcaccctttccctctcatcagtttccacccctcctgctgaaaatggagtacaatgaatagatgtataataaaatcttttaattgtcttagcatatgttgcttttattaggtgggcataattgcattcatgggatcacctacaaagtcctttcgaatataaaattgaaatggcttcacactcagtgcacaagtccttctgaggcactgttttccccttcgctgcctccggttccccttttgctgtgaagttcacattgaagtgtgaaaagagagacgtggcaactgacacatgctggatcttatcagccgcgagtgccgttgtggccgactgaaaagcgactgtcatttctacaccatttattcctcgcctggcctcattgctcgcttcgtttcggaggaaattttccctgttaaagtactgtacttgtcatttatttcccttttttccactctccctccgtggctgggtttggatatgcatttatccaaaaggcaaggcttttacacacttccgctaacctcttatggtcaggctcataaaagcaacccaacaaagcttttatggggtcattacagatccctcaaatccctctccttccagctttcaataattctcttgtctctaatcaattcaccggctcttttatttgaaaatgggtgatggagtgggggaaaaaagtgggagcatcagctgaaaacccactttatttggactaaggtttctcaatgtgtgttcagttctggctcatgcttggcacttacatttgagccatattcagtagtcccagccttacttattcttttacaaaaagggtcagcagactttctgaaaagggacagatagtaaatattttaggctttgtggaccatagggcctgtgtcaaaagtactaaatgttaccattttccttactttgttcaggctgctataacagataccataaactaggtagcttataaataacagaaatgtaattcttaaagttctggagcctgggaagtccaagagcaaagcaacggcagattcagcttctgttgagggctcgttccctggctcatagatgatgacttcttgctgtgtcaacttagtgggaggggataaagcagctctctggggcttcttttagaaaggcacaaatccactcttgtgatctaatcacctttcaaaggccctatcttctaatattatcacattggagattccttttcaacgcttgaattttttgaggatgcaaaccttcagaccatagcactatcatagtgcaaaacaaccatggacaatacacaaatgaacaagtgactatttgctaatagttttatttacaaaaaacaaaaaacagtgggcaggatttgacccatgggctgcagtttgctgatccctgttttattaattagttaatattattgattgagatagggtctcactgtgtcacccaggctggagtgcagtggtgcggtcacagctcactacagcttcaacctcctgggatcaagcagtcttcttgccttagccacccgagtagctggatgacaggtgagcaccaccatgcctggctaattttctaaattttttgtagagacaaggtctcactgtgttgtccaggctggtctcaaactcctgagctcaagtgatcctcccgcctcgacctctcaaagtgctagaattacagttgagagccaccacacccagcctgattcctgttttacatattaaaaatttcatctctccaatcttcgaagaatccgtagtccatttttaagtagctcttgtcttccaaaggtatgggatgtgcctacctaatgctcttcctggatgggagaatattaccaaaaacgtttggtcgactaattttatgacagtttccaactacaatttttttcctctttgctttcttttgaataatagaaacaattttttttgtttaatatatcttgaagtacttcacttaagaaataacttcatggtggcacagagagctgtttagttagaagactgagtattatatttcccattgactatgcaggaccttctagggaaatgtgagtttatcatactcctgcaaggtaaatgcagcagtgagaagaatcagtctactgtgctaaacctggccctgcctcagcaatattctgtgagcctggaggtcaagagttaggggaccaaggtcctgctaaggacacatgggggaactaccagaaactcatcatctcatttaaactcacaaaacctggaagggacataattaaaagtcctgtcttccaaaagtgtagcattaaactcagagatgtaaaacaacgtgtctaaatgccaggtaagcaatgcttacttgacttggaccagggtggtgaatgaacataaaaaccgattacaacatttttccatttttatgtttcctctgaaaccagccatgagaggtactcttagcaaatcacgccttattcctaggcagacttcttgggtacactttccaccctccccagcagtaatgcctgaccaactaatggaatcctaactaatgcagtatgtgacgcctggcagctccagtccgaaccaagggaaaacctgcaaacatgcaatccttcatgcttttgtttttgtttttccttcagcctagctaaaatgaaggcaacattcagaatgatgttagaatctaggtgtggaaagcaatgtagcttctggctggttccttgagtgaccatgtggagcagagcttcccttccattgtatttgagccactggaaatctattacctgatctttctttaccagatccttctttagttgggtatggccaggctcagtgaatccagtagatgtttgaatgggaaaggactgaaagatctcaaccttgaatcccttaactccttgggatgtgtaatggagatgtataagctgtttttaaacatttcagcagctgtcatggaacttaaccaaatgagtctaagtaccctatgaacacatttgatttaggttggaattacagcatagatgtgaagtgacttgtccaaggacacacaggtgatgaagtttacatacaagacttaagtccatgttactggattcctagaccaggttttttttttccccttatcccatagaagatggttgttgtcttgaggtttccactgagttgctttttgagagattctattgtgcacttttgcccagttcaacaagaaagaatctttgctatgttagaagagactctggggaatccagagtcttggtcacgggtacatcaaaacgacgctggtgcctaacttctagttccagacaaagaaggagagagagagagatcagtaatttataggctgacattttccttgggtccttataatacttgtttattacagataatttgcttaagtgtgcacaaggtggaaggtcacgcaaggaagctttttattagttgtgtactgaatggatcaatagtgatttgaatactataaatctatccgttaacaggtttatttcttcatcagatattaattccagagggtttcacccattataaaatggacataaagcctggggtggtgatggtgctgcctctgtaaccaggctcagctgtgtgtcttcgtgagcctccttgtggaccctcaaatgtgggaaggagataggggcaggaggaattggggaaataggaaccttagaaaccctgaagaagtggaaagagaaaaggaaggtcagtcattcattcaattgcttaatttgcttctttctttttctcttcttctttctctctcttctctctctctttctccctccctccctccatttcttcattcctttcttgtctccctgtctatctgtctgtgtatatctattcatctatccatccatccatccattcatcaatccatttatccactctgaatagaaacctaatatagatatacaaaatgaaaaactaggaaaatgcaagaaaccttgacaaaattgctactgtttctaattccaatacttaataataaccactgctacatacaaggacatttgtgtctggtctttttccctattccaggcacatgcattttaatacagttgagatcatattgtatgtctgattttttagcgtattagattttttacattattaagttaatacatgctcatttaaataagtcaaacaatatgaatatataagaagaaaacgctcgtaatttatgctctacctcttccctttgctaagtggcaattttggaccttctgtgaccgtgcaaacatgcagattatacatgcactataggagtggaatgtatgtgacttaatagcgtaatattttgtccattattttaaaacttgctttatttggtcaagacatacggaacacgtatagatcaaacaaaaatttttaaaaatgcttgcatactgctctgtgctgtggagtagccctaattaaatcaatcattcctctgtttatgggcattccatttcttttcaattttgatattattgttgttttagcccttatgaatactacagcaatatatgttattatatactgctggttttaattttgtaggacagatgggatttctgagtcaaaggtcaggtgacataattttgtatcctgtggttttacttaacactatgcagaacgatttcctcgtattgttgaaaactcttggtaggggttttttttttaattggctggaagcacttcatcatatagttgtaccaaagtttgcttaacatcccccttattactcagcctttgggtggtatccagttctttgctttgataaataatgctgagatgaacatctttctgcatggctctttttccttcttttgacatacttggagttctagaagtggaattactgggtcggaggtcacaaatggagaggtcttttaaatctcagcctgcaaacaatcccactgcaggtttaggctgcatgtttcatccatttgcagctgtagcattttacaaaccacagcataaaccctaggaataattctgttccccactgggatagagcattgttattaatataattttacaaacatcattcgtttgaaagctttatccagcctcaccacagctcattagtgaaccttctgacaatcccggggcagtttgtggattctgcagcagacaggttatcgtgtgctgaagggtaccgcaggggaaccttccaacatccccaccctacccaaaggatgattcctgctcacaccagccagctggagacattagagcattacttctcggtggcaagggagggactcttgttctttctggtggttcgttttcatcttcaggtcatgccctgtgtcacctgactcaggcaccattagcatctggggctgtacacgtctttgtactgcacactgtagggtatccaggattcctggccctgccccatgatataccagcgccatgttgtcatcaaaacgaccggaaatgccttttgtgtctccctacttccctttttaacatgtcagcccttggtctcgatattcacatctatatttttccttatcccgttaatatatgttatctaaatatgtgccatctttgtttatgggcttttggtgtaagaactctctgagaatgcagtgattcttcactgggattggaagggatcagaaggagggaaagtaattagcggggcctgttataatggggttggtggggttatttgtgcttttaaagtagaatatcagggtgtttaaaagccaagattctggagtcagaaggcctgggttcaaatcctgacccctcctcttgcaagcttgtgacaccgggcaagttattaacctctttatgcctttattttactataaatatgggataattatagtttttactgcatagttttgttatgaggagtaaatgagtcactatttctgagacacttcgtgcctggcacagaacgagcactgtgtgtgtgttacagaaatatatgtgggtgggtgtgtttctgttttccgtaattccagctaggcaaagacatatttaacaaaagccttctgggctgatgagcatcctcagaaagtaggctgagggagctcttttaaggcagcaggactaagaaggtaaagacatgtactaggcgggtcagcatagtggtggccctcgtctgacacacatatttcaggaggggtcacccctgccgtcttccatgttggggtgctcttctctggcaacccactatgggtactccactgctggccttcatgcaggtggaaccacaccgggaagacccaagccgaggggagaaggcgtgagcagagcaggtggcaggcaccatgaggcagggctagccttgcccactgtctgtggctgaccagctagactcttttccttttcttgcaaacctaatgtaggtacaaggtcaaggctccctgtgaggcttgcatagcaccttcaaccttctagtctttgtcctcccagaaggaaaaaaatgagaggagggagggacacaagaaaagaagatgcattttgtcagccaccgtgctatgaaatgctagcgcagatgacgttcagaactgccctgtgagcagacataaaagcttaggctcaaagagattaaatgtcttatttctgcttttggaagatacacattttatttttttctgtgtctctgaattggcatccaaccataatcattgtgctaatttactgtattcttactctccctctccagtgctgtgagtaaatcagtgtgttccttatacttaataacatactaagtggcaataataattattataacaaatgtatcaaataactatgtgtgaactctgcatgtttcagcccatttaatacccattacctacggaggtggtttctactattgcacccactctacagatgagaaaatggaggcacaaaaagttaaatcatctgccctaggtcccagagctggaatttgaaccaaaggttctgtgcctcccaaatttgtattcttatctctgcatcacactaacactgtcactcagtccttttctcactgctctggtctctatacttagagcttcgagacctgccactcagatgactccagaagaaaacacgctttggtgtcgtgcttgcctttgcccttgtcactttctcaactctcctcacctctgtgactgcatctttataactctcctttattagtgcttttgctggaggaggcaagcatgaacattgtcaaaaggactcaaaatggggaaaagtggcagcaattgccagcacaatcactgaaaaatcttctgaatggattgtaaattaaaccctcccccaaatgctcagaactgttgaattgactaattcaaattcattgagtcagatgcagttagtgtaacagtctatagtaacagtgtagactattagtttgtagagtccacacagaagagtccaattttctttgcacaaagagcctaccattcatttattcaacaaatgcttttgaacacccatcactgtgacagacagtggcaatgcatgtaggaacaaagtgtgtccatgggggcagagacctggaataatcagtcaccatgtaaggaaattcaccagaccaccaatttccacgccttgtatgtttctgttgtctttgctgcagactgaccaaaagcacaagacaaactcttgtccacttggattttagcatctttccctgaccctgcctctgactctggtgttgtgcacccactctgcaactctccaagctccagccctgtagtgccagcctgtacctgcctctcctgagggtcaatatggcatccagccttggtgaagtctcccaccccgtggtgattcatatctgaccctgagaattttccacctttcccagaagagtgggagtctaggaagacaaatagccaagataggagtttgaagaggaggcaccaatggcaatttgggttgttaattcctccagctaatttagttctgatttccccatgctcttggcagtgagacagttggctccagaggaaggtgataaaaaggaatcagtcaaggaacaatcaagaacgtgttacttttttggataatcattggctgtagggattctcctttacattttaaagagggatgaggttgagtctgtccctagcactgacaatgaaacatttatgctgtttataaaaatcaggaaacacacaaataatttgattaacgctcaccttctggtccttttgtgatttgagaggtcttgagataagaaaaactgtggatgaattttactgaactattgaattgagaatggctgagggggagaggccccttccctctgtgaaatatagggaaaagttgtttttcttttctcctagtttcagaatacttggacttacagtcccaaatagcatcatttcctggtgaagccccctgaaccagacaggaaactgcctctcttcaataagagcagaggcagtctcaataaaaaacaaaatttcaacccatcctccgctttggtggcaggcagttcatcttctcacctctacttatttacagtttgaggggaaaaaagaggtaatacttgaaagtgtatttgaccatattttctaactgggagacaatttttttctttaacaattacttttggacatattacttgttagttaaaggagatgtgacacctcctgccccctggccagccaagatccatttgtcatccaggtagcctcagaacggattgagagctcgccgcacagatctcatgtcaaagacaggcgcgtctgtctttcacggcttgggttgtcaggatgcagggagggccttttgtcaaacacctgccgatgagcgtttggcagagcctgtgctaagacatcatagatttccttctgtgttgtcttgagagcagagaaggtggcaggttaaagggaatcaggaaagaaatgagagtgaggataaacgagagggtgtggttctcagggtagaatgcatcggacactgcctagtgtgagaagggactcatctgttttctaggaagtactataaaaaagataaatttagtgctcagatatctgaggcctgatattaggaaaaatacggtaaggcatacatttagaacagatgccatgtctgtgtgtgtgtgtgtgtgcatgcgtgtgtgtgtgtgtgtattattaatatgtctgctggccttgagaaggtacattcagagaattttctgaagtctttttcacatggcctgtattgtcaaaaaatgatgttgggtgttttctgcctgtggctgtgggcctctgtgttcacacagatggtcatatgttcctaaaggatacatccaggactgtgctgacttatttggggtggctgagaagagacatgagccagatgataacaggaataattcagtgtgtgcttcccatggctgctgtaacaaactgcacagcctagagggcttcaaacaacaggaatattatctcacagtcctagaagccagacgtctgagaccacagtgtggacagggccatgctccttctctagagaactctccttgctcctctcgcttccggtggttcagtggcaacgcttggtgtttcctggcttgcagctgcaactatctgacctctgcgtctgtcctcccacggccttctccctgtgtgtttctggatctcttctcctttgttatcaggacactggtcacattggattaagggcctaccctattccagtctgactgcatcttaactgtttaactctgtattccaatctaattacatgtctatttccaagtaacgtcacattctgaggcaatggcggttgggacttgaacatatattcttcgggacatgattcaacctataacaagtaatactagtaatcatctcactcctgtaaacagtacagttgccatacctcaagtatctagtatacttgggacattagtctgggaatttttctccaatcctcacgctagcatttctagtaatgaggaaactgggggtcagggaagcttagtccacatttctcaccttttctccttttctcccatcccccagccagtttttcaacatattggtttttcaccacatgctcactgcagtgaatgttcactcccaagcccaaaagtagacatgtggagtgacaggtgtcactatatcataatatgaagaatttcaaaagccagaagtgcttgagaaaatataaattgtgcagtaaaagaaaacaccctaaatgtgcagagcaggaagtagaatgactctttgggtattgtgtttgttaggggggtcattagaaaatcatagacactgagccgaaccccctgggttcaaatcccagctccaccacttacgaattgaatgactttgagaaagttacttaaatgctgcgtacttcattttcctcccctgtaaaacgggttaatatcagcacttatcacatagtttttgagaaagctaaacgtgcttatctatagtggttattattactagaaagaatatcgtggtgcccccaaacatggatttaacaagcattgatcaaatacctcctatgcccctacgaaccaggtactagaaatccactcctttcacttgcttttgttctgttgtgtttttgagacagagtatcgctctgtcacccaggctggagtgcagcggcgtgatctctgctgactgcattctccatttcccaggttcaagcgattctcctgcctcagcctcccaagtagctgggactacaggcccctccacaccgcacaccgccaccacgcccagctgatttttagtggagacagggtttcaccatgttggccaggctggtcttgaactcctgacctcaagtgatcggcctgcctcagcctcccacagtgatgggattacaggcatgcgccaccatgcctggctaatttttgtatttttagtagagatggggtttcactatgttggccaggctggtctcgaactcctgggctcaagcaatgcactggccttggcctcccacattgctgggattacaggcgtgagccaccatgcctggccccctttcacttgtattttttgagaagagaaagaaagaattatgaatgaattcttctgagctgtgagtccttcctgtgcaccaggcatggatggcaaggcacgattgataatgttccctcttatctcgaaatgtccactctctctcccatgcacggggagtcaagctgtgctcttcaaacacaaattccttctcccacttcctgggtagttatgctcttttcttccctgaggttgctaattgtgggcagtacagtgtagagtcactttgatttttctcatctccttcctggaatgtgccacagaagaaaacccacgaagtcttgagctaaacgaagcagagatgggagaagggacaaggtgggaggcggtagtggtgctgcatgggataaaaatggaaacacacacttttgccctctgtacccaaaaggaaatgtcggtggaggcaggcgttcaagctggcctcgtgtttgtggttttagacacagctttgagtcgtgaccggtgtggccaagacctatttcccttgcaaatgctctctctcttttttcggtaactgtgttactaaagttctcttagatactttacatttcctttcacggatttccaaaatttctttctttgagaatgtcaggaccagtaggaggttcagcacgcattgccagagaaatcacagatgactaattggaatgcctcagaatcattctccttttgtttcacctaatttccacacttacgaagtcaaactctcagttaaatgtttatctagcaattcatttcttctgagccatctgttgctaggcaggatctgcagacctcttggttgcatgtgctgggttgggtcctccaagtctcttagcacaaagtcctgatgtttaaatcctgcaagcgaattgccacctttatttccaagttctcctcgaaatccacattcttccctacagacaacggtggggttcagtgtttgcttttcctggggctgctcggttctctcaccttgcatttctgtggcgccaaggtaagctgaaggcattagtattcacacttgtgtgtgagcagctgagctaacatgcaccagagggaaaatattacttctcataaatgctcaataattatagtctttattgcatgcaaatctatattgtgacacatagtggaaagcttttggattctgtgtggaagagttgacagagatttgcaggtgaaaaagaaaagaaaaaaaatacagatacgtgtatatatagagaaagacaaaaacttgtctgctagaaacctagggagagagatggtattgcccctgggacattggactttctgtttccagcatggtctgtcgtcttccataatggcatttaattttggaaaaattgcctgagcatttggaacaggcatctattaggaaagcctatttcttttttttttctttttgttttttctgagacaggatctcactttgtcacccaggctggagtacagtgtcaccattgtggctcactgcagcctcgacttcccaggcttaggtgatcctcctgtctcagcctcccgagtagctgggactacaggcatgcaccaccactcccagctttgtgtgtgtgtgtgtgtgtgtgtgtgtgtgtgtgtgtgtgtgtgtgtgtgtgtgttttgtagagacagggtctcactgtgttggccaggccggtctcaaactcctagcttcaagcgatcctcctaccttggcctctcaaagtgctaggattacctgcatgagccactgtgcccagcctaggaaagcatatttttgaggaataattatttctagtaatttctgttctaatctaaggggtttgaggttatcttttgacaatagatgttagctaggagagataagaaatggagcaagggaggggtttcatcccgccgtgttcatttgcttggctgtcctgaaattgcgaatacacagttgttacctgctcccggtgggaggggggggatatttatttggcatcttgcaattgataggagctgagtgattttagtaggtagtttaactccttaaaaacttccagtggtttcatattctacctagttttaggtgacagctggtatggggtggggaaggggggggggataaagatattaatttggaagcatttgattgctccattattttatcatcttcccatggaaatgttttcataacgccttgttttttaattattattattattttttgagacagagtctcactgagtcgcccagggcggcggtgtgatctcggctcactgcaacctcagtctcccaggttaaagcaattcttctgcctcagcctcccgagtagctgggattttaggtgtgcaacaccacgcctggctaacttttgtatttttagtaaagacagggtttcaccgtgttggccaggctggtctcgaactcctgacctcaagtgatctgcctgcctcagcctctcacagtgctgggattacaggcgtgagccaccgtgcccggcctcatatccttttttatggaaaaaaaaaatcgggaattagcgtgtagctattaggcgtagattcctgcctaaggtctggatatgaattccaaagaccactggactttggaatattcgtaggtctctgaaaattcagacccacagaggccttaccccgctacagagaggccccaagagagaggcctcacaccctctggctccactgaaattcacttcacgtttccaacttggattaaactggcacgacagttcagtcaaatgtcaagtccattttgtcaagggagggaactcattcagaagatgaactagttggtgttacttagatgattaactacttggcattaggtagaagagggctctgccaactacagttcatggaccaaatcctgcctgctgtttgtttttgtaaataaagttttattggaacacagccaggtgcatttgtttacctattgtctatggctgcttttgcactacagtagcaaagttgagtacttataaatgtagagcctgcaaagtctaaaatatttactatctgcccttttgcaggtaaatttgaggactcttgagttagacagctaattagttggtgttacctaaattttgtgaattgtggctaaatctctcatttgtctacacattcaaataaaatcatgtatcaaaggtgatgtgtgtataataagatgctgggaagatgagcaaagcatgacttcttttttttgttgtttgtttgtttttaagagacggggtctcgctctgttgcagtgtcgcccaggctggagtgcagtggcacaaccttggctcagtgcagcctccgcctctcgggttcaagcgattcttctgcctcagcttcccgagtagctgggactacaggcacctgccaccacacctggctaattttttttgtattttagcagagacagggtttcaccgtgttgcccaggctggtctcgaactcctgagctcaggcaatctgcccgcctctgcctcccaaagtgctgggatcacaggcgtgagccagcgcgcccagcccatgacttctctttatgggagagaaaggccaccgagatagtaagtggacatcaggacatggattctattaaatctaacacctttatctttgcatttccatacattttgcttatttcaaagtagctacaactgcacaaagaatgggctgtcctctcctgctactttataaaagccaagtttttgcttctagctggtcgaaggtcctgtgggagctcacgtttttctcaattactgatgatcatttgagacataatttggagaaggtttctatcaaatcctagctggactgcagtgaaatgttttcaaactagagaagcaccaaataggccatgataaagaataaataccacctaccccaacctggcaaatgtgtgctcacccaaaagtagtggagcctcaagctcagggagatgtgactggaaaatccactgaataaatgtctatttaaaaaaatcatagcgtctaggggatatacacttctaagcccattcttcaatggagaattacttatgcgcataagtagtttaaacaaaattagtggaaaaacagggagtttaagggagcaagagatcaggtcttctgggctcaccacacatcaggtgatttaagctaaaaatggcttaaaataccgcaatcacttgaaacgccttacataaactgaccaggaatctggggcattcgcgttagagacaattttcttctcctcaagataagggatggggaattagtcatagggtatttccagataatgtagttaacacctcgtgtaatattaggtgggcagggagctctgctctcaggaccaaaattgctcctgccagctctaatagggaatgtgtgtatttttaaagtctgggtaagcactgtgagtcatttccacaatacgcctccctttggcgtgaaatggggcagaaagtgccccaaacagctgttattttcgcagtgattcattcattcattcattcattcattcattcattcatccacccatccattcattcattcactcatcacatggcaactcatcacccctgtataccagacccagtgccaaatactggggagatgtgtgtgaacaaaatctcattttcaaggagcttattgcctgctgcacattttagcctcatctcgttagtgcaagaaataatttaacaactgaaaaagatgtgaggttgtacctggtaaggtctctattggtcaaggaaaggtttagcatggagagatttctcttaaggtgcctaggtattcagaagcacccctaaaactgatttgtgtggccctatgcttacaagtggagcctttccctcatttttgctttatttcttttgcctctcactttttatttcctttgtggagtccagcccctttgcttattctcagcacaaaagaggcagtagagtgagaagaacgtgaacttcagagcccacccatcccgtttcacatttgaatcgcaactctgtcattcaccagctgtgcatccttgggaaagtcacttagcctctctgagctctaatttcctcacagggccgcaggactgaggttaaggacctgctgtcactggtacagtggttgaagaaaaggtgaatgaaggaagggcctcgttttactccttgtctcacattcctttctgctacttctctttggctcaccaaaaggagacagaagtttgtgtccatggctgtgaactgccaaagagttgccaattctctacgatctttgacctctgtgatcccaggggcaaggccagcactttccattccattagacttcattctcttgtgggtgctttctgctggaatctcccaatacagaacagaaagcacaggttatggaatcagatagaccaaagttcatctccaaatttgattccctctgcatacaagttgcttacccttgggggccctgtaaaatgaccataatagtaagcacctctgaggctcactggaagaactctttgttgtctgcacagaagatctcagcactaagcctggaacagaggagacttcagtcgatgtagggcatctccccaaactgcttttattctttatgcctcactgaaacttgaatcaaaaagcggctggaggaaaaagagctttgccaccgggcagtactgctgggtcttgcgtcacagagatgccttctgctcccttcttcagggagacctcagagtatgaaagtgctgcttacccagcagatgagatttagtccagtcatccatctgcgtggtctctgtggataaagtaagcgtttcattcaacttttaaaaatattgcaaattgaccctcgcacatcttttcttactgccggtcacctagccagcaaagaccccaggtgagatcccactggtttggaggaaggagaggaaagtccccacttgggcaaaaacaatttaggatacctgaagattgcaaagcccagctcctcacaaagggggtggcagctggggagaagctgaatcagtagacagacaagattgtggtttaacgagttcagggacaagagaaggccccagtaacctacagaagcaactagctccttgccttctgtacaacatggcctttggagtcacaggacgtgagtttggatcccagctctgccacttagtaattgtgtagatttgcacatgttgctggacctctctttgtctcagttttctgtaaactggggaaaatcttagtaaatctagctaacgtggttgttatgaagattctgtgtgtgtgtgtctgtgtgtgtgtatgtgtacaaagaaagtttagagcagcgtgtggcacgtaatgcatattatgtaagtgtagctccaatgtgagttgttacttgtagagaacagctatgtcaaaaccacaccaaaaacgatttggaaaggaaataatttgactggtcattttgtttatccatcaactgagttggattgatatatttttcctttggccttcaaaggaaatttgagcattcattcattcatccttttagagaaatattctctaagcacctaccgtgcgccaagctttgggttggatacctggaacccctctcagtgagatcacagtctaacagcacacacccaactatgaaatatagatggactgtgaagatgaagaaaggttctggttatgaactcacagaggaagtgacggctgaactttgtaaggacacaagtggtttaacaagtttcctggcccatatgagatctcggctccgacgttacaggcagcagtgtggggcctcaccttaccttttcccacttccatccttctccacccccgttcagttcccaggctccccttgtgtgaactggctcatttctcactgcctttctgttctacagcccccgctctgctgagtcaggaggtgctactttctccatctgctttccatcgtccaaaatttttgttgatgtttcttgatcactgagttaaataatttttccccgtattatacattcagtagagtttctggagagagtgcatacaaaaacgcctaactgaatctaccacgtctaagcagatgctcccagagtctatgcttttttcccccatgccatactccccaaactaaaggatgagaaagaaccatgcaggcagaatgagatgagtagatgctactgctaatgctgtcagttctactactaccgccactgctgtcttctgctgagtatggattatatgcctgttccatatgagaacattatgcatatggtgtgatttggtcattccggatggctaaagtgtgagcatacccgtatctcagatttacagaggagaaaacagaggctcagactggttatgtatatttctctaagtcccccagctattgtttgttgtaggttgggtaccccaggaagtagattctgcaactgagattggcatgtaggaagattactggggagtgttctaggatccacacctgtaggggaacgtagcaagcaggatggggtggagggaggattgagctgtgctgtgggagatgcgaatgctccagtcaatcccaaggaaactctgaagctggattattcttcagagatgcaaggaggtcaggaagtcattgatgtgggctccctcctggagtgcgtgttgctttggtagggagctcgctttggctgtgggcagttcctgaggagggactcataggacagcctagcatctgaggaaatgagtgcctcctggcccagaatgggggatctcagcagcacactacaatatccactacagtttcttgggcttgctctgaagccatgcctctctaacttcagggtatattcatgtaagtgaggtgcagggatgggggaaagggagaaggtaaagctacaaaggtaagccagcttgtctagaccgggagctagctccttgtgaaggaatggcaatgataatggttaagtcagattcaagaagtgtgttttggggaaacactccaggtagtggtacatagaatcctagcacaagatcagtgactgggtgagtttgacattgtagatgcaaatgtgtgaggaattatagttgaaaggggaaagaacatttcagtttttcatttcctgcgtcactgtttttcttatttggagatgctgttcctctcaagtgggaaaaatttggttatctcaggtggtaaagatgcctttgtttaaaatattcttctgttagtggggacaataatactactaatttctagtactgacgcttctcatgcaatttaatcagtaggaacctgtttgcatgttcatttgaggaagtaccaaagccaaaagtagcttcgaggtttggcacctctgataaagttacagaagtgcagtgtgagcaaaaatcatcctcttctctgttcttcacctgttggtgaacagtgagagaccaaggtgagagactcggaaattacacatgtacattgtatattacatgtatacaacatacattgtgtattacacatatacaaattacttgtcataacgtgcagatttcacaatgagagaccaagttgaaaaatgcttaaaattcacaagtctatatcattctgtcctccaggtaccccaagctggtttgggtttataccagtttgaaccgagggaccttcagctgaggaacatgtgctctgtgtgctggaagctcctggaggccccagggttatctctgctcacttaggtttgtgatgttgggcaaaaggagaaaatgctgagtctattcggacccaacttccattaatgcctgagaaataatttaaatcgcaagatttccaatcccataagcagccctagcctctcttctcctgatactccacatacccagtctccattccttcttcccccaccctccagttctcatcctgtacactacctccagacccccagggattcagatcctgtctcccccaatgagagacttttttttttagggggagccaaattatttgttacaacatgtagatttcacttgttgtagagatgttctattttcaaggatacagagctcaaagggagcacaattccctggagagctagggaaataatgaagtctaaggtctggcagatctggatctgaatcctggcaatgcatttcgggagttcggtgtcaccctgagcatctttcaattccttgaacttcagtctcctcatctctgaaatggggttattatctacctgcagaggtgctgcagtattaactgaggcaacgttgcaacgtttctagaatgatatttagggctcatattgacccagtaggaagtatagttaccttgggccaggggagctacctgagtggagtcaacttttaggttatagggaccaagttgaaacatgcttaaaattcacaagtctgtaccattctgtccttcaggtaccctaagctggtttgggtttatacattcccacagtgcctaccacatcccaatggctttatgaccttgaggtcctgatctgttttatcatagctcttgatcttcctcaaaaattcttacagctgtattccacaggtcatcaccaagggactgctagaactggatcatagcagcttccaagagctgagtgtgtacatttcctcccaactctgcattcagtttaaattgcttgtggtgagagtattcataccatgggaattggcagacactgtgaatcaaacccaccccctgcactgcccccctccagtgagcgagttcttgaacacttactggtacaccactgtcaccaaccctgctttttgtagacatgtcctttaagcaaagcaattcatgggaaagtaaatttaattatcagaccatttcattagattcctcactgccacaaacaggtggttgtggtgataatctgggcttttttgatcgctttagaaaggcagttctgtaatgacatgaaaaacatattgcttggtaatttatttatttgttcccaatgtttgctacggattgtggtgaaaacacaaacacccaggacaaagggcaaggttcatcccaccatgacgatgggaggcagtttcatcccaccatgatgatgggaagtccttatatcaggactccagggatcttgtgtcctgatataaggctctcactttccaatcagcaggaagttatgcttcccagcctctaggaaagcataggagttaaggagaactgaaatctggggcagttataaatcttcccttatgtgtacaacagtttaaatcaattggtcatctaccaaaatctgaggaacaagagcagctttagaaaatgggctgggcatggtggctcatgcctataatcccagcacttggggaggccaagacaggtggatcacctgaggacaggagttggagaccagcctggccaacatggtgaaaccccgtctctactaaaaaaaaaaacaaaaaccacaaaaattagctgggcatggtggcatgtgcctgcaatcccagctactcgggaggctgaggcaggagaatcgcttgaacctgggaggcggaggttgatgtaagccgagattgcgccactgtactccagcctgagtgagagacagactgtctcaaaaaaagagaaaagtaaagaaaagaaaagagtaagattaaaaacaagtaaagaaaataaatcctcccgctttttttgctccttcatgggtatggctgcatcctctgctcactggtttgagttattattttcccatgggcaattaaagccctggcctccactgcagttttcacatcaaacctaagagtctcaggtgccccttggtggagcaacctaactagagacattaatcatactacgggataattgacaaatgcattgtgagtgtctgatttctgtggctcaggatgcttagtagcagtggggtcaagggcacagatgacacaggtccaaatttccccacccctacgtagtagctgtgtgacctggggcaggttgcttaacttttctggacttttgattccacattggttagatggaaataccatattattataaatattgtaaatagtacccatcaaacacttaatgtgaaccagaaaccctcataaaatgtttgctagtctttgttgttgaaaggtcactatgatgatggctcaaaatcctgacctgaaggtgtgctatgttcctgcttcacttgtgctgtggacatgttcctatttatcatagtgcagttgttgagactgggtgtctagagccatgtgatttggttcagctcctaactctgtcacttgctctttgacctaggcagaaaactttgcctctttgggcttcagtccccggtgtttttattttattttatttttcaagatggagtctcattctgtcacccaagctggagtgcagtggtgcaatcttggctcactgcaacctctgcctcctggcttcaagccatcctcccgcctcagcctcccaagtaagtgggactacaggtgtgcgccaccacgcctggctaatttttgtatttttagtagagatgaggtttcaccatgttggccaggctggtctcgaactcctgacctcaagtgatccacctgccttggcctcccaaagtgttgagatcacaggtgtgagccatggtgccaggcctctcctgtctttaactggggataatgtgtgcagaattccccctaaaggatctatcatgcgtaaggtggaccctcacagaaagcgtcaaagacacacgaatctcttagcaggaggccgccaggtggcacaaaatcaaaactgcatcattgagaattatgttatgaagtcatttactgacttgagcctcagttttcctattaatacaatgagactgtagtaacttcatagggctcttgcaagagttcagctaaaattctccaccttgccacctagaacatgtcacagaaggtatcctggcccctgtatgggattcatacatgaagaggactgccttgtaaagtcatttgattagggatccagagggtgtactggtagaggacagattttcaaccccttgacagttcgaaggtcagctacacaactggcttgtgttcctcgctgacacctccctgagtagcaatgtgcatttgtgtgccttccctttgccaggcatttctaagaggatgaatcctaacaggtatggcagccagagggcaggggcagggagaagaataagatgttccttggtgtaccccattgtcatgagttcatcatttctgttaactgtgggggcagagagttccaattgcaactggcttgttgtgagactgccccggtggttgctgccagatgatccacaaatgccaagctcctcacctgagccctgccagccttcaggacctcctttgcacgaagagcaatttgcagaagagaacactgcaggggaggcaccatagaccccttctggtctgtactgttcaaaatcacatgacatccgccagaggcctggtgggaagccagggttttaggcactagaaatggagctcagaaaggaggagaaaggtccctgctggtctgtggagagggccttggccaccagagggatcaaatggcccaggcaggaaataagtatcccgctctcagatctgaggccagattttcaagtgtatgcatgattctggggtgctacaaagggtatagagtatggagttagaacattacacgtcaacaagaatatgggttttgaacccagacctcagtttgaatctgagttccagcactgccccgttgcttggccgtgagttacttcacctcctttagcctctgtctcccctccactacaataacacctgcctggtggggagtgaggatattgtgcgaatcagaagtaataacaggtcgttggcacctaagagactctcagtaaccagcagtcatcaccaccgtcgtcgtctttttttttggccattacagttgggattagactaaccctccctaagcagctattgagcctcacactccctggacaaagacatgaaaaactctggatgatttggaagggagatctagaaatggtgaaaggactggcaagtgcctctgtgctgatattgtacctgggctcagtggtctggctaaaggagaggtgctggggccaggtgacaggcgagtctctatacggcaggcccaaaaaatggaggtgcaggcttcatctatactttgatgtgtatgcttccttctttaaacttgtgataatcagagttatagctgctttaaacttgtaaaaatcagagttatagctgcttttgaactagtacttgttgtgtgcccaggaaatggccaaatgttatcactcatccttccaagaaacacatgaaggttatattattatgtcgactttccagatgaggagactgaggctcagtggcttgtcataggtgtcaaagacaggagtccaatgtaaggacttctggcttcagcacaggggattttcctaccatcccatattgccaccccatctgcaaaaatacctggatctatcttcctcctgctgattctcagctccctccaggactgaagagatgatattgattctcacttgatagaggttagaaagggcctctcccttccctagctgaatagagagggtttcctttttcttttctttttttttttttttttttaaatgggaaacttacagggaataagatctgtttcttcatttgctttgcaagagagttggatttgtacacgatgcctgagctggctcggttttctaaagacctaactttgcagcattcttcaagggctccagagagtcccttgtgccatcaaattaagtttggaaacttcaataaaaaagtcccgaaggaaactgtcaattaatgcatttacactgaagcatcatatttgggaaaaacatcttcaaacgcaaacgctgttttccaaccattaaaaagtttatgcgctgcttggtttccatggatacctgaggtaatagcctccttcctctcattgaagagtgaatgttgctcagttacttttttcctgttttttttcacttttgtcttcctgacttttttcttccatccctatttatgaaaacaaaaagataactaaattgaaacctgacaatgtaatttgtcagaggaaggcagcctgttttataagctcaggtgatttcatttttgttcacctgtttatttcatgacacttgcaggaaaaagaagaattttcatttgatcaaatcatttccatgatccatcaaacacacaagttaaaaagggaaatgctctcagtctttaataacagtcttaatcgtgtgtagagcagagattgacaaactatggcctgccggctaaatctggcccagtgcctttttttttataaataaagttttattggaatacagacacgttcatttgggtagacgttgtcgatggccgctttcacaacaatagcagagttgagtgatcgtgccagacattatatgggccacagagcctaaattacttaatctctggccctttgcagaagtagtttactgacctattatatacaggaaagaatgagggcttgggtggcacttagtagtgttgtcacttttgtcattggccttgacctgactcagtctccgtattgttgagatgggaatgacgggaccctcagtagtgttttgggatataaggcacacggtaaaggaacaacaaataggaattacattccgtcgagattcttttgctagaaagatccaaagaaacctaccttgtgattctagatgttttttaggaaacccaaagaaagtatgaaaaagcccaagccaagtccttccactgttgttcccgggcctgtgtgtgctgtgtgtctttcctgggagaaggtcagagctggagtggggcactcgattccggcaagagaaggcaaacaaaagaagccacaacagtctaggaagaaatctttaatttctattcagctttaaagagtttgagagagttttttcccctctgttaacaaacgagttcaagtacatgccttcatattataaaagtacctgaaattgcctagaatagcagcatgcatagcttgttagtatttacatatatttacatagggaaacaagagaaagatctacagttatttacagtctacataggggaagagaaaggcagcctaattgtatttcctaaaatacagtagatgagtagtcagcacatgcatatttagataatatttgcatgatagaatgcaaactttaaaaaagacatacctttgtaactttctatgctaaggtgttgcataatcaaggttaatttttgtttgtttctagtctattggcatcaagtgctttaaaatgctcactaacaccgaggcagaattatttacccgggcaattaaagcaacagcacacacgatcatttcctactaactagcaacacgctgctggtgaatgaaatatctattgtttctcattacccatcgaccactgtgaagagatctctctgtgtaaaggcagtgcctaagctatcaccattaattatggaagtaatataaatgagacactctccacagtatgttctaaatgaaatattaacaaggccagcgtcttggaacctgagaaatggtctgttccagtgagctctgtatggaaatccacacacctaactcagacatgcccgatttgaaatagcggggctggacattgggggcctacctgtgagatctgaattattgcaaagtacatcctcttaatttgtttctggaaggcagagttaagagttaattccttcccatgatgtggccccagcggagaccttgtgtttttttttttttttttcttcagtgctttttcaggactatgttatagaatacttatggggcatacgtgtaaatgaactgtcaaccttaaaatctaaacaaacagcttgtttgtggttcgtcctgaaatcctccctgctcacaaaacagccagctacttggttttctaaaagacgtaattttgcaggcagacttcgtagagccattctgtgcagaagaagggaagggagaagctgtttgttttacctgtagtatgaagatattctttgcgctgttagaactgagctcattaattctgcctggcaataatttcaaaggtttattttggtgtagatggcgaatacagatgcatacatttatacgcagtacacgagctagctataaccataacagaggttaaagaagtagagtaaaaatgtaaaatgtttcaaataaacacacactaaatatcttcttttatatcttataaacacccagcagtcctttagcacgggcatcaaggtggcccagttggaaaatttcagtgacatgccatcagatttgttccatgtagaaggacgacactatcagttagatgcttattttgttggcaaatttctatggcacttctgcttggctatttcaaaccaaccatggaagaatagataccccaatgcgatgtttcatccctattcataaagaaactgtactttgagcaatgtaggtatcccaggcagcatcagagggaatgcccagggaattcttccatggatataagacatcatcaacaataccttctcttagttctaatgagacagcctctcaggtccggtcagttctagaacgctttgggcaggcacaaatggaagatggaacaagtgtgcatgtaatgacccacatggattgccttgaagccgtttctttttccttccctcgttaggagtaccctcaccctaaccccagcaaagcatgtctagggtctcacaataatagcaggtctcagaaagataaaataattctgaatgttacaactcgtcccatttaaggctagacataaatctatcacagatcctttggaacatcgatggcaagaattctggaacacgaaggaggtatgaaaagggcttcactcgtttcatggaaaagctcagaacagtttgtcgacttggaaacacaggccctgagagcgtaccaaggtcaccctgcccttcaatcctgctgatagcccaagttaacatcctcccatgccttggccttcccagaacaaacatggctttggacgcctttgggtggttgggactggctgcctatttttctctaaaacttaagttttaggaaagaattctttccagctttccatcctgaacctgctggtctccaggctcgttcctgcaaatatttcacagaggagtaagagccacattcttgctggctttccaattcattctcctctcttcgagtccacctcttaaaacttcttagtgctcttgcaagaaactcatgtcttttgtcagggagaatggcatggcctttgtatgacacttccttctagccagactcggatttgggggcatcatatttgggatggctgcaccgtaaacaggaaaggccacaggacagctcacaggttctctctgaacagaagcctgtgagcacgtgcctgtcatttaaaagctgcatggcactcttccccctgcatgcgtttctctcaaggtgtcccttgtaatttgtggttgtggtctgtgcttgaacctgttgcatttatggtgatggactggcactttactctctctgagccacggccatcaagcccctgtcatagacactgtccctagtgtcacctggggaatgacactcttcacctgtcatgggagaggcaactgaaaaggagcctgaggtttttctacctttgtgaacctgttgctagcaaagaaatatttttccttgtggcaaaagatcaacatctaaacacattgtccacgtctaatttgttagggagggcatgttctcttctggagggctaagagttggcatgggatctaaatggattctccagaacactttctcacacttctaaagcctgaaaacaaatatttgctttcctgatcatcttcattgtttctttttgggaaattgagtgcattcctcttctataataaaggttaagaatagcctgtgagttagcaaaactcccaaaggtttatgaagaaagttacatttcaatacctacaggaagtatttgcatgtgtctaaggctggattgttgaaggcctttgtgggagtcagttgtcaggaatttgtaggaatgactgtgttaggaatcattggaggagagggagtcagagggatggatcagtattttctctgcaaacctgatgaaacactccagagcccgcacctacatgcgtgggaactgataagatgggggttgtgtccacttcacttgtatgggatgtcggtgctttgaaaaaattctatcatcaaagagtaggtttcttagttctgcaaatctggcacctggagatggcattttgaatcggacgacctttttagtaagggtcacttgctgttggatcatcgaagggggtgctgagtcttcatttttgttcatccaaatggatatcatttcaatttagctccatgagtaaatcaatggaaaaaaaaatctccttttaacatttctcgggtgaacacacgacagcccccacatttcattttaggccatgttagggcatcacctcatggccagacatggcctggctgagaaggcggcagagcaggcagagaggcataggaagccggagccccgtggaagacatagatgaggaaatgggccacgtgcaaatatttgtgtcacatatttggggagcaggtttcatgtaccaacggacacggagtctgaagtcactcactctacgtaattatctgtatggctttggacgagttgcttttgatctctgatatcaggtaggcttctctctaaataaatggaaatactaactgtccctggctcatagagctctgtgagggttaggcaacaatgcttacaaagctctccatgcagagcctggcaaatcgtaacctctcaataaatgctagtcattgatgtcacttgaatagtactcgttggctacaactcactgaaaaagccgggcagtttgcagggctgaggactttggagtagacatctctgttctcgtctgctgcttcccatcattttggtggaagttggtgtgttcgttggttagcacttattccaaattgaattgtataatttcattatagaagtatcacggtggaagaagagggtgacttactggtgtggtcacctagccagggaggcctatgagcctcattcctgtataggctgcattactttatgaacaaatgcaatttgtggcaaatgtgtcccctaaaagattgctcttggatagtgagtagggaacaagtggccttttggagcagtttgctttcatttgtgtttccaatgagagattgaagctgtaattgtttgtgaggaatggctgtatcccaagcaccgaggtatctggagatgacctctgcactgttctgggagagtggttatagcctctcctgggggagtgttactgggagacagggaaagacagggcgtgtagacggccatctattccacctgtgacatgagggctcaccccctcatctccaccgcagcagctctctgataaatgtagctctctgataaatgattctgttcctagtggtgtattcacagagtcaatggataaggtggctggctttgcatttgagaagtatttgctttgtccaacagacaccagatgagtaacaatggaagtaggcagggtttgaagaggtatgtgtctttccttttagccaaacctgctcacttcagatcaccactttgtcctgggacgttagtcatgggaacactgccgtcttcaaaagggctgttctccttccctgctcttggtgttccaagcctaatctaacttccagggttcattcctttcataactctactttttgcataagtggattaattcagcatttgctgtgcaatgtccctgtaagaaagcaatcttagaacatctactctctcacaatcattgaatatatagatatgccatgatattgtgtctattttttatatatctcatagttaagtctactttaagacaggaatctcctctttcttttaaatgagcatgcattttaaaatagaaaaacctgaaagcaaaacacggtgtaacatgtgtccctgtgagtattatattagagtactaaccaatgcattacaaatatcaatatgtgggtgctttttttttctttaccatatattgtttatcagaaacctctgtaccctttcctttaaaggagtcaatatgcatttgtattctgtgctgacaactataaattgatggctagcagttatcaaatgaatgttgatgaaaagcagctacttaacattttcatcccaacaccgagttttggaaggatggataatttagatctgagggcctcaactataaataaacagcaactgctttctaaatcccacctttctgtagttgaagattgtgctgcaaatctgacagatgatttttgaaagagaatgatgaatccttattaccaagatactcttaatcccaaacaagagtcctgggtaattttacatatactctcaagattgattgcacagttctcctctggcagctcacaaatgtttgactagatcggaaatggcattcgggcatgattaaaaagattcttctgggcttcccagaaattctcagtcctgtgtcgtcaacaacctaactcattgccattgctgcgggatagacacctcccccgtttcccatgattagcaaccatatacaacctacaggcttctgataaatgattgattctcaaaaaaaaaaaatcgtttaggggaacccatagctccagccagtgtttgtatgtcaaggtattattatttatcacaatggatcagtaagcattgatgacaactggcaaggtattgcttcagatattttataacggagttgttaacattatttcctttagatggctctttcatcttttctgcattatgaactgatgccccaaaaggtggtatgaatgaaagtcatctgatggtgattaaagtgctctttaaattttttttttaatcagtttaagaatgctttctcttttattggcagtacctgcttgtttactattgagatttcactaatgtgcctcagtcttattctgatgatatgtaggccgaaaagctggtgagccaaaaatgagaacctgttactaaactgtcatcacatctgatcatattaagatgtcactcagaggttgccattggtacggctgaaaattctccaagagaccaaaggtgtggtgtgtatgggaccaacaagatattgttactgcttaattgtccagcaagggaggaaagtagagtgagtacccatgagcaccaagcatgaatctgagaaggagaatttgccaaaggtggacgattgatttttggagtagagaaggtcgtctttgctttcgggtgcccctcctgtgtactgtgttctacaaagccagagccacttgtgatggaatttagatggtaaatcaccccaagcctagtggcaaaggaatcaaagccatctcctgataaaaagttaggcttttcaaaaaggtatggctctcagcattgtagccaaatgtaggttggcatgaaatgaagccagttgtaattgcctttagattccgtggaaggaaaaggtaggtccccagctcctgcaacaatggcattctgaatcaatgggactgcagaatttcttagcaaaaataccattccagtaatgcaagagtgcaacgtggtatcattacagtaggtcatagtggcaaaatattttatcaggttaggaagaattctgctttttgctttcccaaacggactgctttggtctttcctcacgcttggcagaacagtgaaaggccagtctgtcatgacgtttgaatgctgaatagtataaccattgtggcatagagggcgggaggctggacttgaaatgggtgagctggattctcccaccactcgggagttaatggcaagtcacttggccactctggtcgttttggcagctgcaaggtaaaatgaaaatatatgacagatatctggaagttgatacaaaacaccatctccaccagaactctaagattccaggccaaaataatacttggcttgagttagctggatgagcatctcaattctccaatttgtctttagaggcacttctgcttcccttttccccacatgggatgcagaagagccagataaaccccttgaagttgtttagataaatgtgccaggtgctaagctcagggttattaggaataataattcagtgaaaggaaatttggatgacatgaactcatttccattagacttgagccacacaaatcaatgggaaaagaaacagctgaatccaggataatatctggctatttggagtgggcatgataatggagggagattggggaggtaacaaaccagctactattaagttcaagtcatgtcagttattcaaattcaggaccagtggaacttgtccagtatcatcaagcagccagttattatcaaaacccaagtctttgtctcactcacggtccacaccccgcccagagtcgtatcacttgactgcatttgaccattcagttttcagaccaactccattgttactagatatcctgacactgaagaagctaaaaccaaacaacaatgacaacaacaaacccaagtctgccttatggcagattcttcacgtcgtaacaccttccttgggaccctatttctcagtatggacctgactctcccagggatcctagaatgcaagcatagtgattgcaaaccagaccatttgagggaaactcctccagtaagcaccctgcatggtcacaatgtaaaccctgcaggggcagaaaaatgataagctttgggtcgggtcggaaagccatttcccccacaatcaaagttccttagtgttttccttgtgggggcgagcttatcttcagttaccttttccggtcctctcttgcaacccctctccctctcatcagctgaaaattagtggatgcagctagggctctgaaacacataaataatcataagatgccagataaactgtattggttttaaattagagacgtgccgaccatgtctccctctgaacagcagcctattatttttaattatggcttgcaaagcaaagtgatttcttgccctctttatagcatccctgacagtattctgtcagtttggatgatatgatgcctcatcactgcacacgtccctagccacagccgcaactgttactcaaaaggtgaatgaaagtgatcagctgcactctttgcaacttacattttgaagtgggctgggaggaaatgtacccccttacctgtggtcccattgtaaatctgggtcaaatatgacatttagaaaaaggttttcatgggatctggatgaattaatgtgttatgtgtttgtgctaagtatgaatgtatggtgaggagtgtgtgtgtgtgtgtgtgtgtgcattaaatgttttaacacaacattgccaacccttcccctagcagcaccgtgggcaaagcataaagggatgatctggcagcagccccacttgggttttctacctgatggaccacaattaagagtggttggtttgtcagacagaaggttctacaaacgatttggtatcgaattacattatacatggagaagttgaggggttggatgaatttgttcttgcacgttcagaaggataccatctttttctctgtgtggaagaggcgcctgccacgacgtattgatatgtgtatttattttccaagcctgtccctgtatgaggtgtcaaaagttacaccagctttacaagcggagtttatgaactcgtttttccaggatagtcacattatactttttacagtcatgtgctttcagcccagtaccctttgctatgccaagatccagctgaaactgaaccaggtgggggaggcctgctaatgcccaggcagtcgaaatgacgccatctcatcactccttttcttaaaatttttttttgtctttcttcttggatttccagcaacagggagctgccaccaccgtgtactgtgctgctgtcccagaactggagggtctgggagggatgtacttcaacaactgctgccgctgcatgccctcaccagaagctcagagcgaagagacggcccggaccctgtgggcgctcagcgagaggctgatccaagaacggcttggcagccagtccggctaagtggagctcagagcggatgggcacacacacccgccctgtgtgtgtcccctcacgcaagtgccagggctgggccccttccaaatgtccctccaacacagatccgcaagagtaaaggaaataagagcagtcacaacagagtgaaaaatcttaagtaccaatgggaagcagggaattcctggggtaaagtatcacttttctggggctgggctaggcataggtctctttgctttctggtggtggcctgtttgaaagtaaaaacctgcttggtgtgtaggttccgtatctccctggagaagcaccagcaattctctttcttttactgttatagaatagcctgaggtcccctcgtcccatccagctaccaccacggccaccactgcagccgggggctggccttctcctacttagggaagaaaaagcaagtgttcactgctccttgctgcattgatccaggagataattgtttcattcatcctgaccaagactgagccagcttagcaactgctggggagacaaatctcagaaccttgtcccagccagtgaggatgacagtgacacccagagggagtagaatacgcagaactaccaggtggcaaagtacttgtcatagactcctttgctaatgctatgcaaaaaattctttagagattataacaaatttttcaaatcattccttagataccttgaaaggcaggaagggaagcgtatatacttaagaatacacaggatattttggggggcagagaataaaacgttagttaatccctttgtctgtcaatcacagtctcagttctcttgctttcacattgtacttaaacctcctgctgtgcctcgcatcctatgcttaataaaagaacatgcttgaatatcatcacctgaagtttgtattgtttctttaaatgtttgtttcagtttgtttttgtttttcattttttagaaaagaaatctagaggaaaaataaagcgcttctaataaagcgcttctcgtagatgccaggaaaacacgattcttgtttcttctctgagtgagtttgtgttttgtttttgtgctttgtggctgtccgtgggccaagttgtctcacgcgattagcatgccagcatattttctgttaaagaaagaaaaaagaaaaatgactattgtttcatttcaccttaagatgttttgttattacttacttacagtgagttattttagtcctcaatggtctgctcccctgcaattagcaagtacttagtgattagcgggtatctctatgtttgagaatgggagctgtgcagaagctcttatctgcgcatcccatctcatggacaccatgatttccagcccgttccagcaagcacatgagaaagtccactctggcaagacggagaaaatgcttctgctgaaataccaggaaggtgtggaggctgggtgtcattgttccccctcctgatcatggcagcttcaggccagacaatgtcttgaacttctgtgcctctgcatctgtggtgcagagcagtcgaacaaacaaacaccattgccctccagtggcccatagccttgccacatcctcccatctggctatagtcttccttacgtaatccttattatcacaggacctttgaaactatgaatcagataatgtcacttttcagacattattgtcatttgcaaaagcagccgtcagaactccactctcagaatctacacctggaggggatcacccctcccatatgacctctgactttggccatgtgactggccttggccaatttggaaagtgctttgcactggggcttgcctttccttgttgatctttggaaccctgcaacttccatcatagggaacggctcctgggctagcctgctggatgatgagagacacgtagtcactcccagaaccggcatccagcagttagttagttagacatgtaagtgaggccatcccagactatccagccccagctgtgccaattcagaggagaagaaactgcacatttcactcacagcaatgcaaaagatagtaaaagtttattttaagccactaagtttcaggattacatgttactcagcaaaagctaactgatacagcttctcagctcactaaggttaatttttttctaccctacttctcttataatttggtctccagctacctctctaatctcaacttccagcactttatccactagaagccactctagtcttcctctgttcctcgaacatgccaagcacactcccaactcaaggggtgcatatttgctgtttcctctgctgaaatgctttccttccagaaaccagcatgcctttcttcctcactgatttttagtctctgctcacgttatccctgtcttcatggtgtcaccccattcttattccccttcccctctattttttctccacaacacttaatattattgtacacattatgtgtctattttttctgtctacccactataagaaactccatgaaatttgtctgttttcttcacaacttggccacagtaccttgaactgctcctgtcacacagcaaacttactgacttaataaataaccactgaaagaatgattctgggtgactaggctttatgttcaggaaaataatttccatcattgtgacaatgatcccgagccacacactgtgctaagcaggctacattaccactgtcgcccgggctgcagtgcaatggcatgatctcagctcactgcaacctccacctcccaggttcacgcgattctcctgcctcagcctaccaaatagctgggattacaggtacacaccaccacacctggctaatttttcatattttaagtagagacggggtttcactatgttggccaggctggtcttgaactcctgaccttgtgatctgccctcctcagcctcccaaagtgctgggattacaggtgtgagccactgtgcctggctttttttttttttttttttttttttttgagacagaatctcactctgttgcccagtctagagtgcagtggcgtgattttggctcactgcaacctccctccccggttcaagcgattctcctgccccatccttcagagtagctgggattacaggtgcccacaaccacacctggctaatctttgtattttcagtcgagatgggtttgaccatgttggccaggctggtctcgaactcctgacctcaggtgatccacccacctcagccccccaaagtgctgggattacaggtgtgagctaccatgcttggctattacatctgatttctaatatgactacagtcttgccagttcaccccttctccccattttactgatgaaaaagctgaggccaagaagtgtcaatctgctgttgtccatacagctcataaattgatagagctgcagttcacacccaggagtgtttgatttcaaggtcatgcagattgcctgcaccagtgccactgctccttccataagttgactatatccattctggtaggatgcaccatcttttttccttttaaacagagatggggtcttgctatgttgaccaggctagtctggaactcctggccttaagcaatcctcccattacaggcatgaaccactgtgcctggccatggatgcaccatcttaaaatcttaggctgatcagagaggtgactttatgggtctgactctagttatgcttcaagcatttggtggaagtgaaagtaaagccacgagaaagaagatattggcgtatcatcagccaaggtgctgtgcaaaatgtcaaagagaaccaagagaggacatgctggcctcctgcttcctggccgtgtctagggcctctatgctgacttcctcctctgtggatcctgcagggttcacatctgcaggctgacaacatgaggcctcggggaactttgtaagggtagctgaggattctcccaaatcaagatttccaagtcatatagaccaaggcttcatacattcattcatttaacaaacataccaagtgctacatcctggaaattcaaggtttaaagtaaacccctccacagcctctgctataaaggaatttacatcttgggtctgtaggagtcctcacaaagcacaacgtcctactccactttatcagaagttatctacgttacttgaagatgaactgaggccccgtaacagtagcgattgccccctcatgcccatttctccctgaacccactcagtcagacactgtcagtccccatgggccattttctcttgccagacacatcaatcttatttccttggctatttctgtgataaattcttgacaggtgagcaagtgcatggcataattcctattattcctattttagcttattctatggccaaccctatttctccccatttgtcatatgtgcacatctgtatatgtatatgtcatgcacatctgtatatgtatgtcgtgcacgtgtatatgtatatatgtcgtgcacatctgtatatgtatacgtgtcatgtgcacatctatatgtgtatatgtacatgtatgcatgcacaaatatgtgtgccatacatgtaaaacacaggcattatagatgtataacacatatatgtggcacatgtgcatatgcacatatatgtattgcatatatatgtgtatattcacatatatgtatacagatgatccctaactcatgatggtttgacttatgatttttgaactttacgatgatgtaaaagtgatattcagtagaaactgtgcttagagtacccatatgactattgtttcttcctttcagtatagcattcaataaattacatgagacattcaaccctctaataaatcaggctaagtgttaaatggttgtgttaaatgcctttgtccaactctaggtaaacttaagttttctgaacacattaaaggtaggctgggctatgctatgatgttcaatacattaggtgtattaaatgcatttttgacttatattttcaacttactatgggtttagacggtaaccccatagtaagttgaggagcctctgtgtacatatatgtgtgtatttgtagtatatgatttatgtaataatgatcctactctatctgctacttttttttttttttttgagatggagtctcgctctgtcacccaggctggagtgcagcggcacgatctttgctcactgccacagccacctccggggttcaagagattctcctgcctcagcctcctgaatagctggaattacaggcacccgccaccatgcctggctaatttttgtgtttttagtagagatagggttttgccatgttggccaggctggtctcgaactcctgccctaaagtgatccaactgcctcagcctcccagagtgctgggattacaggcatgagccatcgcacccggtgtcatctgctacttctaatttcagatgctatttactgagcatactctgtgccagttgatgggttaggcaaatcactttatgctcataggatgaaagtgagttttagagagaaagtaacctctccacagtctcatagctggtagacagcagagtcaggatgtgaagccagctccatctgccttgaagcccatgggccttccactacacactacttttatgtgtggcctatagactagaagcatatatacattacattcatacaatgggtgaattatctgcaagggaagaccagttgatttcctatttaagaatgagctctggctcttctcctgataccgaaatgtccagtataaaccttacaaatcatttttgtacatgccatttatccagcaatattggcttcagccttgcctacatttctcaataggccctctctcctgttctgactgtaagttggtctgcaccttctcatggactcaacatcccgagttcttcgcgctcatctgatgctacagaatccacccaaacaggaagagtaggccagtttctctgcagtcgttttcttccaagtccctctctctccctaagtttctttcaactccaaaggtggccagtttccactttcacacctgattaagggagaccttgctgcaacttatcaataggaaacaagaaattgaagcattccccagcaatgactgaaggctgtggcttgtggttttgctttttaaaatggggttatgagtggttttgttttgaactccagtgaaggaggcctgatgacgttcatcaaggtcaacactaggccagaaagacttggcttgcaatatcactgcccattctgttcaccagcaggcaccatttttagaagcttatgtaaaaaaaaaaaaaaaaaaaaaaaaaaaaaaaaaaaaaatctaaaatagcaataccctgtctattaactctttgtgtctttcaatatatccaagctagtttagctgaggtcactttagaatactaagtaatatcacaaattattattcatataatcactgaacaaacagctctgagttgtatctatagatgttatgttattgcctttcaaggattcatggtatttggcttcatgccccccctttttttcccttcccccctcaaagtcatcttatttctcaaagttttccattattttaatggctacctcatatatcacataggtgatgggccattatttggaaacccattcccctactgtgggacatttaggttatttctagtttctgttagaactaatggttcaattagcatctttatgcatacagctttttccttctatcaattgatctcctcagcatacctttgtagagcgtagaactggagttccttgatccaacagctcctactggcctttgccacagagagccacaatgctatctggaagggttacacaggcagaaccagcatattactgtttgtttacaaccttatcaacacagggtgttcccactgataacattttaaactgattttcacattgtcacaacctgtaactatttatatatggtattcccaagcagccagcctccttatttaaagtataagcattctgtctttcattttcccacaggacagagttcacatgtttaattagagtggaaattcaaagtgagtctacattcagtttgggcagaaaaataccagtccatccaagctactgcactgttactagattattgcaccagtgaagagcctaccttttttccttttcaatctccagttgtagcactacacagattccatctgaatgcagtgcaaagcccaaaactcacaccccaagcctctgtggttcatactggcttaggtatttaccccactagccaggattccttagctggttacttcttcccagctgatgcaccgtctgcttttataaacatgtgccacaccacttagaaagaagtgtcttgcctctaagctgatctgtttacaaggccatgccctgctgcatcttaggcgtgagagaataaaagctccttttaattttcaaaacagagttacgcaaatagaggctctccatggctcattcagatgagggaggctctgtgtcttcttccggctttcctgattttatctgatgttcaccaagagcttgtcctgttactttggaattgtgacaatgtctcatctgatgctgggcattccctgagggacagtccatttttataaagcaccatttcccgagtgcttaccaaaacgcctatctgaaattctgtctttgttcatttaagactcacagcttttgtacaaaaaattagccaggcaaggtggcgggcgcctgtagtcccagctactccggaggctgaggcaggagaatggcgtgaacccggggggcggagcctaaagtgagcggacatcgcgccactgcactccagcctgggcgacagcgagactctgcctcaaaaaaaaaaaaaaaaaaaaaaaaaaaagactcacagcttttgaagtgaatgttactgtccccttttcaccaatgagcaaaccatttgaatcgtggggtcaccacttcctgtgtgacgctgtgccaccattgtacgtctccactccaaggccatttgtctctgaccccgttccctactgtcactctgcgtctgtgatctcctgtacctcagacttcattcctaccgtgctttattttcaatgtaggacttgtttaggcttctctaagctgaacaagtgggaattccattggtaatttacctgaatgtggctttatgtttatatcctttcaatatgatttgtgatattggttatataaaaagttgtatcatcgtatttaaatagagttaatcttggaaataactggtaactaatgttctgttaaacaaaatgtactgctgtttttattaaaaaattaaaattctttgggatgccaaggtgggcagatcacctgaggtcaggagttcaagaccagcctagccaacatggtggaaccctgtctctactaaaaatacaaaaattagccgggtgtggtggtgggcacctgtagtcccagttactcgggaggctgaggcaggagaattgcttgagcccaggaggtggaagctgctgtgagctcagatggtgccaatgcactccagcctgggcaacagagtgagactccatctcaaaaaaaaaaaaaaaaaaagttaaagttaaaatgcatgcccagcatttaagtttggggggcaggatcagaaaaacacatgtgcccatagtcccaccactcaaaagaaccaactagtgtaaatactgtggtacattttttatgcattagaaaatttgcatgtatcttgtagttttcattttatatagttgtgattatattccatatacaccttgatatatttcaaactaagtaaattattttaaaataatttaatgcctttatgatcctgtatctagcgaacagatagatatatggtagttacttaatcatttttttattcttggagagttaaaatttctaccctttaccaccaccatgtttcattaatataaatcgtggtttagtaaatatatttgtgtaagatttgggggaactctttattttcttaacatcagttccaaggagaatgctggggtcaaacaacatgaaaatatttaaggctctgggtagttactggcaagatactttttctgtgctgcctacacagatggcttttatctctgctgctggttttctttgagaagagtaggtatgtttcacccaggtggatatgctgctgatcagtttattttccccagatgacctgcctgtctggcatgcagcactgttaaccttaccgggagatgccattaaagttcctgggtatgcaactctctttcccgtctggaaccaagacagaagaggacaggagcattgtgtcagcgaaataaaaaaaggctgaatgcggaaagcagaaagaaacaagctaaactttgggtcagctcgttttgccagccttttgatagtgttcattgttctgctgcttcagaacctactgagaaagttcgaagactttcttgactgcgttgggaaatgttcagaattctttgcctggtttgctaagacagagcttgcccttaaacttggttccggggaattttacctggtgtggcctagatttgaaggactttatgatgaagtacttggctttgtgctcttcttattattggctgccttcaaacccactttagggagagaggctgagcagatcctccctgggaaaaaattcagtcatgttaccgttttctgaacaagaatccagaaccttccagaagcctgtgtaaatcactctatgtgttcccaaagcattcacagctcagcactttcaaaatataggagcagaagacatgaaaaaaatgaacactcatacatctatatctcatgttcaatctgaatagcaaatattaatagtaaaaaccactgtttaaagtattaaaatcactatgatccttattaataatacaaaacagagcttcttaatccagaaattcaaattctagcagttaatcctaaaacaaggcaatcttcatcatctggacagctgataagagtgtatgtgattatgtgtgtgtacatgtgcatgagtgtatgtgattgtgtatgtgtgtgtgtgcacgtgtgtacgtatacgtgattgtgtgtgtatgtgtgtgtgtgcatgtatgtgtagatatcaggagtttcagaattcaaaaaccgcatgaacagactaatagatctgtgaagttctgttattaaaaacaatttaattatgtttaaccctaatcctttgaacacaggccactgctttgtttttgtctttgattttttttcattagctatttgttaatacacttccctgggacacagacagagaaacgtttttcttaaagcagtaaaaataatatcatgagaaaccggagatcaatttaaatgtctaacagttggggcgaagctctctgactaccatgaaataacgttgtgggagaaatttaatagaaatgatgtttaagactaacagcagatctctcggcagaaaccctaaaagccagaagacctacaagccagaagagaaagggggccaattttcaacattattaaagaaaagaattttcaacccaggatttcatatccagccaaactgagtttcataagcgaaggagaaataaaattctttacagacaagcaaattctgagcgattttatcaccaccaggcctgtcttacaagagctcctgaagaaagcactaaacatggaaaggaacaactgataccagccactgcaaaaagataccaaattgtaaagaccatcaacactatgaagaaactgcatcaactaatgggcaaagtaactagctagcatcataatgacaggatcaaattcacacataacaaccctaaaacttaaagtataataataaaaaaaagaaaacaatattaaccttcaatacaaatggactaaatgctccaattaaaagacacagactggcaaattagataaagagtcaagacccatcctgtgctgtattcaggaaacccatctcacgtgcagagacacaaataggctcaaaataaagagatacaggaagatttaccaagcaagtgggaagaaaaaaaagcagggttgcaatcctagtctctgataaaacagtttaaaccaacaagatcaaaagagacaaagaagggcattacataatggtaaagggatcaatgcaacaagaactaactatcctaaatatatatgcacccaataccggagcacccaaactcataaagcaagttcttaaagacctacaaagaaacttagactaccacacagtaatagtgggagacttcaacactccactgtcaatattagacatatcgacgagacagaaaattaacaaggatatccaggacttgaactcagctctggaccaagcagatctaatagacatttacagaactctccaccgcaaatcaacaaaatatacattcttctcagcaccacattgcacttattgtaaaattgaccacataattggaagtaaaacactactcagcaaatgcaaaagaacggacaacataacagtctctcagaccacagtgcaatcatattagaactcaggattaagaaactcactcaaaactgcacaactacatggaacctgaacaacctgctcctgaatgactactgggtaagtaacaaaatgaagacagaaataaagttctttcaaaccaatgagaacaaagacacaatgtagcagaatctctgggacacatttaaaccagtgtgtagagggaaatttatagcactaaatgcccacaagagaaagcaggaaagatctaaaatcgacactctaacatcacaattaaaagaactagagaagcaagagcaaataaattccaaagttagcaaaagacaagaaataactaagatcagagcagaactgaaggagatagagacacaaaaaacccttcaaaaaatcaatgaatccagaaactggtttttttgcaaagatcaacaaaatacaccactagccagattaataaagaagaaaagagggaagaattaaatagactcaataaaaaatgataaaggggatatcaccactgatctcacagaaatacaaactaccatcagagaatactataaacacctctgtgcaaataaactagaaaatctagaagaaatggataaattcctggacatatacaccctcccaagactcaaccaggaagaagtcaaatccctgaatagaccaataacaagttctgaaattgagggagtaattaatagcctaccacccaaaataagtccaggaccagagggattcaaagccaaattctaccaggagtacaaagaggagctggtaccataccttctgaaactattgcaaacaataggaaaagaaggaatcctccttaactcattttatgaggccagcatcatcctgataccaaaacctggcagagacacaacaaaaaaagaaaatttgaggccgatatccctgatgaacattgctgcgaaaatcctcaataaaatactggcaaaccgaatccagcagcacatcaaaaagcttatgcaccacgatcgagtcagttttatccctgggatgcaaggctggtttaacatatgcaaatcagtaaacgtaatccatcacataaacagaacggatgataaaaaccacatgattctcgcaatagatgcagaaaaggccttcaacaaaattcaacaacccttcatgctaaaactctcaataaactaggtattgatggaacgtatctcaaaataataagagctatttttgacacacccatagccaatatcatactgaatgggcaaaaactggaagcatgccttttgaaaacctgcacaagacaaggatgccctctctcactgctcctattccacatagtattggaagttctggccaggacaatcagacaagagaaagaaataaagggtattcaattaggaaaaaaggaagtcaaattgtctctgtttacagatgacatgattgcatatttagaaaaccctatcgtctcagcccaaaacctccttaagcagataagcaacttcagcaaagtctcaggatacaaaatccatgtgcaaaaatcacaagcatttctatacaccaataatagacaaacaagagagcaaaatcatgagtgaactcctattcacaattgctacaaagagaataaaatacctaggaacacaacttacaagggattatgaaagacctcttcaaggagaactacaaaccactgctcaaggaaataagagaggacacaaacaaatggataaacattgcatgctcatgggtaggaagaatcaatattgtgaaaatggccatactgcccaaagcaatttatagattcagtgctatccccatcaagctaccactgactttcttcacagaattagaaaaaactaccttaaatttcatatggaaccaaaaaagagcccacatagccaagacaatccaaagcaaaaagagcaaagctggaggcatcatgctgcctgacttcaaaggatactacaaggctacaataactaaaaagcatggtactggtgccaaaacagatatatagattaatggaacagaacaaaggcctcagaaatagcaccacaaaactacaaccatctgatccttgacaaacttgagaaaaacaagcaatggggaaagaattccctatttgataaatggtgttgagaaaactggctagccatatgcagaaaacagaaactggaacccttccttatgccttatacaaaaattaactcaagctggattaaagacctaaacataagacctaaaaccataaaaaccctagaagaaaacctaggcaacaccatccaggtcataggtatgggcaaagacatatgggcaaagacttcatgactaaaacagccaaagcaatggcaacaaaagccaaaattgagaaatgggatccaattaaactaaatagcttcttcacagcaaaagaaactatcatcagagtgaacaggaaacctacagaatgggagaaaatttttgcaatctatccatctgacaaagggctaatatccagaatctacaaagaacttaaacaaatttacaagaaaaaaaaccacacaaccccatcaaaaagtgggcaaaggatataaacagacacttctcaaaagaagacatttatacagtcagcaaacatatgaaaaaatgctcatcatcactggtcattagagaaatgcaaatcacaaacacaatgagataccatctcacaccagttagaatggtgatcattaaaaagtcaggaaagaacagatgctggagaggatgtggagatataggaacacttttacactgttggtgagagtgtaaattagttcaaccattgtggaagacagtgtggcaattcctcaaggatctagaactagaaataccatttgacccagcaatcccattactgggtatatacccaaaggattataaatcattctactataaagacaaatgcacacgtatgtttattgcagtactgtgcacagtagtaaagacttggaaccaacccaaatgcccatcaatgatagactggataaagaaaatgtggcacatatataccatggaatactatgcagccataaaaaaggatgagttcatgtcctttgcagggacatggatgaagctgaaaaccaacattctcagcaaaccaacacaagaacagaaaaccaaacactgtacgttctgactcataagtgggagttgaacattgagaacacacggacaagggagggtaacatcacataccagggcctgtcagggggtggggtgttaggggagggatagcattaggagacatacctaatgtagatgacgggttgatgggtgcaacaaaccaccatggcatgtgtatacctatgtaaaaacctgcatgttctgcacatgtaccccagaacttaaagtatataaaaaaatttaaaaacaaaatgtttataacctattagatgaaaaatgtacgttataaaagttggtagggtatgatcccatttttgttaaacctacattcatgactttgtacctacaaatacgtattgagagaaaaaatgaatgaaaaagtgctaataatgtttatctctgggtagaggacatgtggatgacatttttttcttaggctcatctatattccccacattttctatgataaaggtatgctctaatagtttttaaaaagtaaaatttagaaaaatgatgacaaaatatgccagtgcttgtaaaacatgcccagctgccttattgagtattatagcacggctgtgagctgactcaggtccagtcatggagcctccagaaagtactcttgagttgacatactgacagaaatggaatggcttgtaagtttcccaggaacaggatggggaaccttagggctacatggcaccaagaaacatatatttgaaaaaaataaaagcaggtggattattttgggtcacttaattgtttcaaaataactggctgggccagttaatcccagccctttggcaggctaaggcagcaggatcctttcagtccaggagtttgagatgagcctggtctcaaccccatctctacaaaagtctggtctcaaatcccgtctctacaaaaaattatccaggcatggcggcacacacctgtggtcccagctactcaggaggctgaggtagggggatcgcctgggcctgggaggtcaagactgcagtgagccttgattgtgccactgcactctagcctgggggacagaaggataccctgtctcacacaaacaaacaaacaaaacaaaacaactggctggttgtctgaattacctttcattgctgtgtgtgtatgaacaccatctccctgtgactttggccaggtcagtattcaacaagagactttttttccacttgagtttgacattctgccatggtcgagtaacggtactgtaattgtttagctcctcatgtctccacctcagtgcactcctattaaccttgaacattcatgcccagattttgccacacccagagtatggatatatgacaaaccccattctacgttttgttttattactacttgctaaaaatttgaactaaatgataagctgaagtattgattttttttttgcccatctcatctctgctactataaagtttttaaacattggaaaacaaaataatacattttacgctactctaaacaaatatcctcatcaaaaaaacctgaaatatttagacttaaaaaatatcagcaatgtcaatataactgttgagtggagagaaatcctgggtgtagaccacaacttctttcttggaatctgagaataataccttttcagaaaaatctttgagacagggtctttctctgtcacacaggcaagactgctatggcacaattatagcttactgttaccttgaactcctgcgctcaagcgatcctctcacctgagcctcccaagtagctaggactataggcacgcaccaccacacgcagctaagtacttagtttttgtagagataaggtcttgctatgttgcccaggctggtctccaactcctagcctcaagtgatcctcctgcttctgcctcccaaagggaggttgggattataggtataagccaccttgcccagccacattatttttgaactttaaagttatttcatgacttgtgtaacaactatttgaagggaaagaatgaaaaatatgccatctacaaggaaagcgtgaatacctaagaaacatccaaataattcacccattaactatcagtctaaatgagggcaaggtgggtctgatctcctaataatatcacatgtgcttcattcataaaatcaagaaagaatggcttcactagatcctgctctgactttaatcccaggacaggaaatgcactgataattctcaaagctttggataggaaagcttcacaaattggcctggatccatttctgtggctgtgagtcttcacacattgatcttcctgatccctgagcccctgccggtgtttcctcactggctcatgcccttttcaatggttggcacctttgatcataaatgtttccacaggtacacaaagacaggcatgaaagatagaggaaaagagctctctgcctatatttgttatggttgaaaattcagatgtttctcctctgtttccacttaggctgagttacaaggtaatttgctcaggaagacgaatataatggtggtggggggttagggcagggggaggtccgctcagggtttccaccaagggtgcaggtttaacagaagccagaatgggaggatcatgtacatagactacagtgagaatggtaccccagttcctccctccagcaacatcagcctgcaccagtctgagacagggcacggtggggaatgaggggccaagatgggctttcatcgttaacacacatccatcagagcacaattcttcttggagcaaaagatacagcacagtagaaaaagcccaatcagccacattctaatccccttctcacccacggagctgtgtgatcctggcaaatcatgtgtcctctcagagcttcttccttcaaacatagaccccccccaacacccaggtcacacgaactttctccttctgaggataaaggccacagccggaatttagtaacattaattttaaaaccctcatctccaggccagaaaagcctctcccaaccccttggaaacgggttttgatggcaccaccaagacagcagggtcagtgactcacggatttgggggatggccttgtgggcgcgaggctcctccggaaagcaggcattgtgcagggtgtctctttgatggtcttttaaagagctttccctgttagctagagcagtttcaccttcagatagagctgcctttccgttgtccgtggaattcactgcacatttcgagggaccgcctgtcctggcagagagcaagggactcataaaagtgtcagaacattatgaacagcccgaagatgggctgtgagcggggataagtgaagcgcggcgtggaggccgttcggtaactccatccatctgtggacaggggcgtgaggacaaggcgaacagactcgtggcgagcagcacctgggcaagccagcaggtgcttgagccacggggctggctcctcgttgagctatctagaggagtgcaccgagcaaagcgcctgctgaaaatactttgtacctccgggattccttctcttcacttcgaagtgaaagatgcggagtttaatcctaacctagtggtgagagggtcctaaattcccttcctcgtagaatgacctgatttctgcggctctgagcttgcttgcggcagcctgtgtattaatttaacttcgtttttataggccttttgcatgcaatgttaaacacacagccccgccatctaatcaaaagggactcttatcaatttgcaggatagttgcttacagaaaaaaaaagaataaaagcactacactgaatccttcattcttaagaggtaaatatcgatcactgagaatgtatttaatcactgatcttgtaaacaggttgtaaacacatacatgctgagtgactctgtaggcaagccctatctttgagaaacatttctggttcttacacagttaactttctggagttgaattgcacagaacctgaggactgaatgctagacgtggttatggcaagggaagctctctttggcattctgggttctgacctttcacccggctaaggcaggctgcttctgtgggtgcctccagcagtgacagaaagaatgtacaggaggtgtgaccaatagagggaactgagcaagaagtactgaggctcggagagtcaccatccgccttgaaggcactggaccagacctcagataaacgaagcccagcctagaccctgcccttgcccgggtgggcggtcttgagcaaattaggtaagaccattgatttcgaagaatgtttccaacctggaaaaccatgtagtacaaaggaataaacgtgggtcgaatcctggttctacagctgagcaaccttcagcacaacactgtgcctctccatgtctgcaaagttgacctgaaaatgcatactacacatggttcctttaaacttgaagaaattaaccaagtatacgaaaagagttgatgcataggcttgctaccaattccattttcgcatgatggagtgtgctttctgaagctaacattctaagattatattccaaatttcctgaacaaaatgtacttattgcatagcaagacttgcccctgagatccttaattatccatttattttgggatgaagataggcgaatacattttactgactctgcttcccgctcagtaattctttttctgatcctacggggtagggctgcatacgctaatatttctctgcccaaaatatacggatatcacttgcctaaaactggctgcagcttgtcgggttggtcaggttcaaatatctattttaaaaatcacccaaaaagcaaattaaaataagaaatgtcatgtttttctgtatagtcttattagttttgccccaggaaaaatggagtaaaaatagctctcaggtgggatagcagggacagccacgatactgtctccacctggatgtgaaatctggggaccaggaagctcaaagtcactctttgccaatgggctcttatgggacaggatatctcaagtgctcaaaggccagacttgactgtttaagaacccgggctagcatgcacacagggagatgccacaattttggtattctgacctggtttctggggtaaaactggaaatgagctcttgctgcgttttaatttttaaattaacatcagatataaacctgaaagaaggcctatcaaggatgtagtctaaatcacgaaagctgacagaagcggaaataaaaccatctattgaatggaacagaaaacagtggtctcggcaccaagaatagaagattcctggctcattggattcaaatgtgaattttcttatctctgttatcacctgtctagttatcaggtatctacctgcctatctatctattgttccatcccatcccttaaaaggggttcttatgttgcaaaaagaagaaagcaggaaagaattacaaaggtgttaagataactatatggaacatgctgttctcaacctttttggcaccagggactggtttcacggaagacagtttttctgtggaccggagttaggtggcagatggtttcgggatgatttaagcacgttacatttacggtgaactgtatttctattattattacattgtaatatataatgaaataattatacaactcactataatgtagaatctgtggaagccctgagcttattttcctgcaactagacggtcccatctgtgggtgatgggaagcagtgacagatcatcatgcattagactctcataaggagcacacaacctagatcccttgcatgcacagtttacaatagggtttgccctcttatgacaatctaatgccaccgctgataggacaggaggtggagctcaagtggtaatgtgagcaatggggaacggctgcaattacagatgaagttttgttccctcacctgctactcacctcttactgcgcattccagttcctaacaggccatggattggtaccaatctgtggcccaggggttggggaatccctgatatagacaatatacaagttaaaaagacttaaattacatatactgtggtctattaaaatggctgggttggtgaaatgtgaatttggggagatatgaatataggcatggtttcttcttaccttcacatgtaaacacttttgtactttacaaaatttgcataagaacattttcatgttattgatacgacttttggtaacacctgcagcagattccagaatttggaggtacggtagttgactcgacaatttctcttttatatggagaaagaaacttggagtcttgatacaacataatatcccagcctagatcatgaagaagttaactgagaaggctcttaccaacatacttaacctaatattagaaggacatttcaggcttaagcccttcctgcctgacactcatggcacatggacagtgtgtgaagtttggttagaagttaaatcaaaataaaaatagtca

SEQ ID NO: 5694 - DNA, 300684 bp, Homo sapiens
  GARNL4 gene - 2627100 - 2887783 of chr17; NCBI Entrez Gene ID: 23108; Build 35; sequence includes 20,000 bases upstream of initiation codon and 20,000 bases downstream of termination codon of the gene
tggaatcactcttcaagtgaagctccaatagagaaaccagataaaagtagaattaatctcctttatttaattcttttttttgagatagggtctcactctgttgcccaggctggagtgcagtggtgcaatctcggctcactgcagcctccacctcccaggctcaagtgatcctcccacctcagcctcccaagtagctgggactgcaggcatgggccatcacgcccagctaatttttgtattttttttgtagaggtgggatttcaccatattgtccatagctagtctcgaactcctgggctcgagcgatctacccacttcagcctcccaaagtgctgggattacaggcatgagccaccgtgcccctggcagaggtaatccacttttgaattacctcaggggaggtgggcagttagtgtccctttcctcaaaatgacatagcattccatcgcccgaccacagcgcctggctcaagtatgggtgtgtgacctaggtcaggtcagtgacatgacatcatgggaactgggctggaaccactgagacagggaagctctgtctccatagagtgttgatctgggccactgatgaccaccttgctgccacaaggactaaaactggaacagagggaggcagaggtataaagaaagtaggaccaccccagcaccccagaccttccagatcagttccctcacttcacagaagaaataggaagagatttaaggcgtagagcttggatgcctgttttgactcatcctcccaactcttgcccctggcactgtctgctggggttgtttcttgggctggacctgatgatgcctgaattttttttttttttgagatggagtctcacactgtcacccaagctggagtggagtggcgcgatctcggctcactgcaagctccgcctgccgggttcacaccattctcctgcctcagcctcctgagtagctgggactacaggtgcccgccaccacgccaggctaattttttgtatttttagtagagacggggtttcaccatgttagcccggatggtgtcgatctcctgacctcatgatccgcccgccttggcctctcaaagtgctgggattacaggcgtgagccaccacgcctggccacgccccccccccttttttttttttaagatgaagtctacctctgttgcccaggctggagtgcagtggtgtgatcttggcttactgcaacctgtgcctcctgggttcaagtgattcccctgcctcagcctcccgagtacctgggactacaggtgcgcaccaccacgcctggctaattttttctattttagtagagagagggtttcaccatgttggccaggctggtcttgatctctgactttgtgatccgcctgcctcagcctcccaaagtgctgggattacaagtgtgagccactgcacccagccacatgaatcatttttagtgccgtaattgggtttggggtcacccctcaccccagataaaagctcatctttctgagaaggtcctgaagatgtgacttgagtggttaggcagcctggcagggtgcacgtctgaggccgagataccctctcaatccatgccatgctccagccatggccagccatgctccagctgtggcccctggatctaggacttcccactgagtcagtttactttcctttttaatgaatcaggattctttcacttgtaaattgtagaaatcgactcaaactagcttcaaagaaaaagggaatttatagactcactgaactgaaaaaactctaggagctcttcatgtttcaggcacagctagattcaggagctcaaacaacgccactgaggctggagtgcagtggcgatcacagctcactgcagcctcgacttcccaggcctgagtgatcctcctccatcagcttcccatgtagctggggccatagttgaggtccaccatcgagagccaccacgtctggctaacttttacatctttttttttgcagagatggggtcttgctatattgtccaggctggtctcaaactcctgggctcaagggatcctcccatcttggcctcccaaagtgctggggctacaggcatgagccactgtgcccagccttgagtcatcattcctttacctaacctctactgacaatctttcaagtattttgaacattttgatattacaagcattgtggcaaagaacattcttgaatctatatctgtgcatacttgtgcaaagatagtggttggatactttattattttttattttttgagacagaatcttgctctgtcacccaggatagagtgcagtggctcaatcacagctcactgtagcctctacccgctaggctcaggtgatccttccacctcagccccctgagtaactgggactacaggcacgtgccaccacgcccagctaattttttgtattttattttttgagacagagtctcactcttgtcgcccaggctggagtgcaatggtacaacctcagctcactgcaacctccgcctcccaggttcaagcaattctcctgcctcagcccccggagtagctgggattacaggcgcctgccaccatacccggctaatttttatatttttagtagagatggggtttcaccatgttggccaggctggtctcaaactcctgacctcaggtgatctgcccgctttggcctcccaaaatgctgggattacaggcatgagccaccgcgcccggccaattctttgtattttttatagaagcaggttttcaccatgttgcccaggctggtctgaaactcctggctcaagtgatgcatttgcctcccgaagtgttgagattatagatttgagccagcgcgcctggcccatggttggatatattcttcaaagtgaaattgcagggtaaaaacatttgcatattgaaaaagatattgccaacctgacctccaaagaagttgtaccgttttatattatctccagtgatgtgtgagatgccagtttcttcacaattttgctcatgctgcgattaacaaactttaaaatcttggccaatctcactgatgaaaaatggtctcttggaccatcctggctaacacggtgaaaccccgtctctaccaaaaatacaaaaaattagccaggcgtggtggcgggagcctgtagtcccagctactggggaggctgaggcaggagaatggtgtgaacctgggaggcggagcttgcagtgagttgagatcgcgccactgcactccaacctgggggacagagcgagactctgtctcaaaaaaaaaaaaaaaaaaaaagaaaagaaaaaagaaaaatggtctcgttaactttcacttttttttgagacggagtcttgctctgtcgcccagggtggagtgtagtggcgcaatctcagctcactgcagcctctgcctcctgggttcaaacaattctcctgcctcagcctcctgagtagctgagattacaggtgtgtgccaccacacccggctaatttttgtatttttagtagaggcagggtttcaccatgttggccaggctggtcttgaactcctgacctcaggtgatccatcgaccttggcctcccagagtgctgggattacaggcgtgagccaccgcgcctggccaactttcacttttttttttacttacggtaaactttaattttccctaatgtcctttccctgttctagggccccattcaagataccgcattacgtttagttcctgtgcttcgttgagctcctcttagctgtgaaagcttctcagacgttccttgttttagatgaccttgacagtttttgaggagtactgctcatattttgtagattgccactcactcagttgggatttctctgatgtttttctcatgattaaactggtattatgagttttggggaggaggatcacagggatgggtgccattttcttttcttttctttctttttctttttttttgagacacagtttcactcttgttgtccaggctggagtgcaatggtgtgatctctgcacactgcaacctccgcctccggggttcaagcgattcttctgcctcagcctcccgagtagctgggattacaggcgtgtgccaccatgcctaattaatttttgtatgtttagtagggttgaggtttcaccttgttggccaggctggtcttgaactcctgaccttaaatgatccacccatctcggcctcccaaagtgctgggattacaggagtgagccactgagcctggccggtggggtgccattttctctttttggtcttttttcttttttttttttttttgagacggagtttcactcttgttgcccaggctggagtgcaatggtgtgatctcagctcaccgcaacctccgtcccccgggttcaagcgattctcttgcctcagcctcccaaacagctgggattacaggcatgtgccaccactcccagctaattttgtatttttagtagagacggggtttctccacgttggccaggctggtttcagactcccaggctcaggtgatctgcccgcctcggcctcccaacgtgctgggattacaggtgtgaggcaccgcacccggccaggggggtgccattctcatcatatcgtcaagggtatatacagttgtccctttgtatccttgggggattggtttcagcacccttggggataccagaattcaaggatgctctagtcccttgagtaaaatggtgaagtacaggtcgcagaatttgtttgagaaaagaaatacaataaaataaataaattggtgctgggtgtgggaatgtgcaccagctgtgtacgaaggttccggtttttccacatccccatcaacacttgttattatctctgtctttgcttatagccatcctagtgagtgtgaaatggtgtctcattgtggttttcatttgcatttccctgatggctgatgacgtcgggcatcttttcatgtagttattgtccgtttatatatctttttttttttttttttttttttttttgagacggagtcttgctctgttgcccatgctggagcacagtggtgcaatcttggcttactgcaagctccgcctcccaggttcacgccattctctatctcagcctcccgagtagctgggactacaggcgcccgccaccacgcccagctaattttttgtgtttttagtagagacggggtttcaccgtgttagccaggatgatctcgatctcctgacctcgtgatccacctgcctcggcctcccaaagtgctgggattacaggcgtgagccactgcgcctggccgtccatttatatatcctttttagagaaaggactattcagatcctttgcccatgtttaaattgtgttagttgtctttgtattattgagttgtaaaagtttcttttttctttcttttttttttttttttttgagacagagtcttactctgtcgccgaggctggagtgcagtggcacgatctcggctcactgcaacctccacctcccaggttcaagtgattctcctgcctcagcctcctgaatagctgggattagaggtgcccacaaccacacctggctaatttttgttttttttttggtagagatgggatttcaccatgctggccaagctggtctcgaactccttacctcagatgatccacttgccttggcctcccaaagtgctatgctggaattacgtgagccactgcacccagcctgggttaggatttcaacatagaaattttgtggggacacaaaaattcgggccctagcactgggtctcgtcacttcaagtgatcctcctgcctcagcctccttggtagctggggctataggtgcacgccaccatacctggctaattatttatcttttgtagagataaggttttgccacgttgcccacgctggtctcgaactcccggactcaagcaatcctcctacctcagcctctgaaagtactgggactacaggtgtgagccaccacacccagctttcttgccgaagtttgagtggctgatagtgattgaaaaggttggccctctgtagcagttactctccttcagtgtagtgttcagcgggatttcagatacacggcaaggtgatagggaagatagttggagatggcagtttacttttccttatattcaatgcaatccaattcagcaaacatattttctacgttaacaagttggactcgttagtggggatcatctgtgtcagagcattccgaggatgtagttagttgatcactgttcttgctgtgatttttacagcaggctggcttcgaagaccagagggctgtgtaaggatgttgtggggatttcagagatggatcagatacagcctttgtacttcagcagtgagacagacaggcacataaataactaacatccaggcaggcagagaaatgctgtgatcaaggttaaggaaggccgggtgcggcagctcatgcctggaatcccagcgctttgggaggccgaggcaggtggatcacctgaagtcaggagttcaagaccaggctggcaatcatggtgcaaccctgtctctactaaaaatgcacaaattagctgggcgtggtggcgggtgcctgtaatcccagctactagggaggctgaggcaggagaatctcttgaacttgggaggtggaggttgcaatgagccgagattgtaccactgcactccagcctgggtgacacagagagactctgtctcaaaacaaaaaaagaataaagaataaaagaaaatccctcattcacagcctctgggagatgggggtggagagcgggaggaggggaggggaggctgggtggggccaggaggtgaaggctgtgcaggtggccggggctgtattccaccagtggaaagggtgagtgatggggttggagtgggagatggctcctgagtgagcctgctcttctttcagcctggggacctgtgtgtgcccggtgggatcaaggacagcatgatgtgatgtgtggtctgtcagcccgggagagaccctgtgcctctgctgggtctcacgtcctcatctataaaataaagctgctggaccagatgagtgacttcttgggatttttctggccctagcaacctacgatgatgtcataatcagaagatatcttaaattaaaaaaaaaaggtatttaccttttaaaaaatataaaataggctgtgcgcagtggctcacgcctgtaatcccagcattttgggaggctgaggcgggtggatcatttgaggtcaggagtttgagaccagcctggccaacatggtgtaaccctgtctgtactaaaaatacaaaaattagccgggcatggtggcgggcgcctgtaatcccagctactcgggaggctgaggcaggcgaattgcatgaacctgggaggtggaggttgcagtgagcctagattgcgccattgcctgggcgacgcagcaagactctgtctcaaaaaataaaaatagaaggccaggcgcggtggctcacgcctgtaatcctagcactttgggaagccgaggcgggtggatcatgaggtcaggggtttgagaccagcctgaccaacatggtgaaaccccgtctctactaaaagcacaaaaattagctgggtgtggtggcaggcacctataatcccagctactcaggaggctgaggcaggagaattgcttgaacctgggaggtggaggttgcagtgagctgagatcatgccactgcactccagcctgggtgacagaacgagactccgtctcaaaaataaataaataaaaaaataaaaataaaaacagagtgagattccatctcaaaaataaaaatacaatatagtcacatggttctcattcaaaagggtctaaagcagtgacagggctccccaggcactaatctccctcctcggaggcaaccaggtttaccagttcatcagtgttatcagtttctcccacagagatggcaagagtctgtcacccagggctgaattctgaggaacccaacgatggggaaagtcagggacactcatgctcagaataggatgggattaatcagggtgggcttcctggaggagcctaattactcatgctcagaataggatgggctcctggaggagcctacttttgagccaggttttacaggaggggagtcactttggggcaggaagcaggtcacagaggagggacatgtcccaaatggaagtcataatctttcctctcaaagctgtcctcatccagtacagatggctccgcagccagccacctgcacaaaccaggaacgggggaatgatgttgctgcctgtcttctcacctgtgtccagcccagcaccaggtcctgccaacaccacttccttagcacattctcaagtcgccccatcttacctgagccgggagtggtagctaacacctgtaatcccagctactcaggaagctgaggcaggaggatcgcttgagcccaggagaccagcctgggcaacatattgagaccctgtttctaaaaaacagagagggcgcggtggctcacgcctgtaatcccagcactttgagaggctgaggcaggcggatcatttgaggtcaggagatcgagaccatcctggctaacatggtgaaaccccgtctctactaaaataatacaaaaaattagccgggcatggtggtgggcgcctgtagtcccagctacttgggaggctgaggcaggaggatggtgtgaacccagaaggcagagcttgcagtgagctgagatcgcgccactgcaccccagactgggcgacagagggagactctgtctcaaaaaaaaaaaagagtttgagcaagagcagcctggccaatatggtgaaaccccctctctactaaaaatacaaaaaaatgagccaggcatggtgctgcgcccctgtaatcccagctactcgggaggctgaggctcgagaattgcttgaacccgggaggtggaggttgcagtgagccaagattgcaccactgcactccagcctgggtgacagagtgagaacctgtctccaaacaaacaaacaaacaaagcgtctaacctggccgtcctattattttccacccagcagccaggatgatcttctcaacacacccactgcattatgtggaggagagtggaaagaggccggcgaggacagatgctgtggttgggcggccatgggggcggtggcagccttgtgctctgcagcaacccaacctcttttagatccgggacactgtgcgtcctctgcaccctggggcccattctaccacggcgcctttctcccagtgagtccttgttatgaactgaatgtttgtgtccccggaaattcataggttgaaatcctagccccgcactgtgatgggtttaggagacggggcctttgggagggagagaggtcttgaaagtggagcccacatccagacgcactggctcacgcctgtaatctcagcactttgggaggccaggtgggcgaatcaccaggtcaggagttcgagaccagcttggccaacatggcagaagcccatctctactaaaaatacaaaaaattgtcccagctacttgggaggctgaggcaggagaattgcttgaacccaggaggtggaggttgctgtgagccgagatcacgccattgcactccagctcaggtgacagagaaagactccgtctaaaaaaaaaaaagtggagccctcatgaatgggattagtgtctgtatacgaagatgcatgagagagatgctctgtgtccctgccatgtgaggatgcaatgggcgtctgcatgccaggaagagggccctcaccaggcactggcgcctcaaccttaggacatcccagcctccagaactgagagatacatttctgtcatttaagccatgcagtctatgctatttgattgtagcagccccaactgtctaacagggtcctccttatcttgtcctttagagctcagctcaaactgcctctccccggggaggacttatgggaagtcccctcccccagcaaatcccctgtgccccactgggcaacatcagggcagctgcacagttttttttttttcatagcactttatccagtttgtaatgatacaggctgacaggcaggcacccctccagtcttctccctcgttaaagatttggaattggtggccaggcgtggtggctcacgtctgtaatcccagcactttgggaggccgaggtgggtggatcacgaggtcaggagttcgagaccagcctggccaaggtggtgaaaccccgtttccactaaaaacacaaaaattaaccgggtgtggtgacagatgcctgtaatcccagctgcttgggaggctgaggcaggagaatcacttgaacccgggcggcagaggttgcagtgagttgagatcatgccactgcactccagcctgggcaacagagtgagactctgttaaaaaaaaaaaaaaaaaaaaaaaaaaaaggttggaataggtaatctctctcctgtgtgagaagatacgttgtgaaaaggtcactttcccatgccctcatccaccctcttctctcttcccccaacccaggaggtgacttttattagcttttgtgtctccagagtttctacaggtaaagataagcgagtatgaattcccactttattccctgccccctttttaatgtcaatcacgcatgaggccctgcacttgattttttcctctgaacaatgtgccttggagatcttggcaggatagcacatgggaacaccctcatttacaacatcttttatggccacacatggctttactatatggatgtaccataatttattatagctttttttttttttttgagatggactcactctctctcccaggctggagtgcggtggcacgatcttggctcactgcaagctccgcctcccaggttcacgctattctcctgcctcagcctcccgagtagctgggattacaggtacctgccaccacgcccagctaatttcttttgtatttttagcaaacgaggtttcaccgtattagccaggatggtttcaatctcctgacctcgtgatccatctgcctcggcctcccaaagtgctgggattacaggcgtgagccaccgtacgtggccaatttattatagctttttatttctttattataatttatttagctccctactgaagggtgcatgggtcgccctcagtcttttgctattatagacaatcccacagcaagcattgtccacttgctggaatccctaggtaaattccccaaagaggggattattgggataaaagggaaatgcatttggaattcagacagatgttgtcaggttgtccttcagagcggttgtaccaagtgacattcccactgataatgtatcagagtgcctgtttgtaattatacatgtatttatgtgattattgtatggtttctctccccacaggagggcagggactatgtcagttttctttatcatcataggccctcaataaatgttgaattaggctgggcgtggtggctcacgcctgcaatcccagaactttgggaggccaaggtgggcggatcacctgaggtcagcagttccagaccagcctggccaacatggtgaaaccccatctctactaaaaatacaaaaattagctgggcatggtggtgggtgcctgtaattccagctactcaggagactgagggaggagaatcacatgaacctgggatgcagaggttgcagtgagctgagatgaagccattgcactctaggctgggcaacaagagcgaaactctgtctcaaaaaaaaaaaaaaaaaagagttgaattaatgaatagattcatggttcttccaggaggggttggccaaggtaggagggagatcaccttcattttatgttcactgtgcccggcccagcttccctgatccttccatagaacagctgggagcctgggagagaccctggaggttctagaagacctaatcttgactgctgactcctgacccctgctccagagtagcccttctcctgctgtgaaatcaagaagtccatggctaggctcagtggtgcactcctgtaaacccagcactttgggaggcccaggcaggaagatcgcttgaggccaggagttcaagaccagcctgggcaacatagcaagatcctgtctctacaaaaaatttaataagaaaattagctgggtggggtggcttgtgcctgcagtcctagctactcaagataccgaggcgagaggattgcttgagtccacaggttggaggcttcagtgaactataattgcgccactgcactctagcctggatgagaaagtgaaaccatttctctaaaaaaaaaaaaaaaaaaaaaaaaaaaaaaaaaaaaaaaaggtctgggtgcggtggctcacgcctgtaatcccagcactttgggaggccgaggcgggcggatcacgaggtcaggagatcgagaccatcctggctaacacggtgaaaccccgtctgtactaaaaatacaaaaaattagccgggcgtggcggtgggcgcctgtagtcccagctactcgggaggctgaggcgggagaatggcgtgaacctggaaggcggagcttgcagtgagccgagatcgcgccactgcactccagcctgggtgacagagcgagactccatctcaaaaaaataaaataaaatgaaataacataaataaaataaaataaaataaaataaaaaagaaaaaataagtccaatgtcttagccctgtaaaggggcttaaaggatggacacttgcctgatgcctgaattgcctgtgtgtcctctgcttacatacctccagtgacggggaacttactccttccaagtgacttctttcagcttcagacaactaacttctagaaagcttttccatctactgccaggtgcagtggttcacacctgtaatcccaggactttgggaggccaaggcgggtggatcacttgaggtcaggaatttgagaccagcctggccaacatggtaaaaccccgtctcaactaaaaatacaaaaattagcgaggcgtggtggtgggcacctgtaatcccagctacctgggaggctgaggcaggagaatcgcttgaacttgggaggtggaggttgcagtgagccaaaatcgcaccactgcactccagcctgggcaacagagagagactcggtctcaaaacaaaaaaaaaaaaaaaaagaagaagaaaggaaagcttttccatttattgcgttgaaatctgatccttctagctgcctcctcttcagggaatcttaatgatggccctctggaaacagggctttctggcagatgagcaggagggatatttgtaaacaggtacccctcagcaattctccggcaagcagggctgactctcccaaggagctctgcagagctcagccacctcctcactctctcctgtcctgcccacaggtacgtgcaggaagggcggttccgaatcgaggagaggacgctgacagccttccagtggctctacagcccgcagcagcatcgcatcctcagccgggctgacctcgagtctccctccaggtaaaggggccttctgccttgaccctcacattctttggcctcggcccaggcctctcagctggtacttaggaagtgagctccgcactggtccacaaatccaccatggggaactttgccctcagtgatggggaggccttctaggaaagaatttatcagcctggatgcttgtcccacctcgaatgcactgaggcaactcactgcctctgctttctcctctataaaacggataggatcatactttccctgacttctcttgggagattataagtctccagtgaaatatgactgcagagatttacaaagcctggagattggtcgggctcagtggctcatgcctgtaatcccagcactttgggaggctgaggtgggtggatcacttgaggtcaggagttcaagagcagcctggccaacatggtgaaaactcgtctctactaaaaatacaaaaattagctgagcgtggtggcacatgcctgtaatcccagctactcgggattgagtagctgagacaggagaatctcttgaaccccggaggcagaggttgcagtgagccgcagttgaaccactgcactccagcctgggcaacagagggagactctgtttcaaaaaacaaacaaacaaacaaacaacaaacaacataaaacaaacaaaaaacccaacaaaacaaaacaaaagaccaaagactggagatccctggttccttcctctctggagggagagtggcaggtaaatttgctgggcacactttgctttgacctggagccagccgtgccttctttgtccgcctcctttcccatgccagagagtccagctgggatcctgagtctgggtagggggctgggaggtgagggctttttctgacccagatccttgctccaaacccctgcccactcttcccccagcactggacacgtatggccagcatcggcagtcacaacagaggcgtcctggcaacccttctgcagccacagcgcttcccaaggcctctgccacacccgacccggggactttctttccactttccccatcaaagccacttttttgttttttttttttgttttttttttttagatagagttttgctcttgtcgtccaggctggagtgtaatggcacgatcttggctcactgcaacctccgcctcctggaggcgattctcctgcctcagcctcccgcgtagctgggattacagatgcccgccaccatacctggctaatttttgtatttttagtagagtcaggttttcaccatgttggccaggctggtcttgaattcctgatctcaggtgatccacccgccttggcctcccaaagtgctgggattacaagcgtgagccactgtgcccggccacataacttcagatttcatacatgggaaggttacatgccagaggacttgaagaagagtctgccatatagtcattgagataagtgactgaattcatttttgtgatagaatattaatttttttttaagaaatagagtctcactgtgttgcccatgctggccttgaacccctgggctcaagtgatcctcctgactcagccacaatagttctcttttttttgagatggagtttcactcttgttacccagcctggagtgcaatggcatgatcttggctcactgcagcctccgcctccagggttcaagcgattctcctccctcagcctcttgagtagctgggattacaggcatgtggcaccacgcccagctaattttttatatttttagtagagacggggtttcaccatggtcaggctggtctcgaactcctgacctcagatgatccacccacctgtgcctaccaaagtactgggattacaggtgtgaacacaatagtttctaattattttatttaatgtattttgagacagggtctcactctgtcacacgggctggactgcaatgggatgatcatggcttactacagcctcaaacttttgggctcaaggaatcctgttcagcctcctgagtagctgggactataggcatgcaccaccttgcatggctaatttatttcattttattcttatttttatagagatggggtctccctattgtgcccaggctggtcaactcctaggttcaagccattctcctgcctctgcctcccaaggtgctgagatgacagacgtgagccactgtgcccagccaatagttatttttttagttcccgttatgtgtcatgcaaatgctttgcaggaataaattgatttaatcttcatagcaatgctatgatctaggtactattgttgtccttgtttttcagatgaggaaactgaggcacagaggttaagttacagctagtaagtggcagtgctcccaactactatgcacactgcctctcagagaataaggtttatacttgaagtgggggaaaaggggcgtaatttctttttctttttctttctttcttttttttttttttttttttgagacggagttttgctcttgttgcccaggctggagtgcaatggcacaatctcagctcactgcaacctccgtttcctgggttcaaatgattctcctgcctcagcctccctagtagctgggattacaggcatgcgtcaccacacctggctaattttgtatttttagtagatacagggtttcactatgttggctaggctggtctcgaactcctcgaactcctcccagagtgctgggattacaggcgtgagccactgtgcccagcctctttacaaagagcaagaaggtggtgtccgcaaactatagatgggtggacttagcatcagtcctagtcaagttccagagtcagcagttattaaagaggaggtgtgtgggcacttagacaaggaagacgtggacgatccgcatcggtgagtaggttccctaagaactcaccctactaggggaagctttttgcttttctgattagttttctagactcaaaattagaccgggggtggagcaggagactgcttctgagtttcagcaagcaattgttctttcttcttgtggtcaggtccttgcagatgacacagagccacatgggcagggggatgggacagctaaggaggttggtgagtggactgccatcagctgagttctattcagtgtgtttaaaggtggtttgatgagggaaggtgtgaccagtgtgctggcgacattgctgatggcaggaacctgggtaccattccagcaagcaagatggcagaattgggacccaaagtgccctggaagctgaattccaggtccaagtccagtagatactattcattcattcattcgttcattttagcaaggatgctcacagtagacactatttatttatttatttatttatttatttatttatttatttattcttttttgagacagtttcactcttgtcgcccaggctggagtgcaatggtgccatctcagctcactgcaacctccgcctcccgggtttaagcaattctcctgcctcagcctcccgagtagctgggattacaggtgcccgccacgatgcccaactaagttttgtatttttagtagagaaggggtttcaccatgttggccaggctggtctcaaactcctgccctcaggtgatctgcctgcctcggcctcccaaagtgctgggattacaggcatgagccatcgtgcctggccaggtagtagacacaatttaacaggggtaaaggataaatgtattttggtttctaatcctgtttgcacctgggcagcagggtgaaggaatcagaattgtctgaagggttcccatggagtagaagcttgggtatggccccatgtgttaggtgtctaccaaagaaaacgcttacattttgaggctgcaagagctcagggcagagtccagagtgagggaagagaaggtcctgctgttctgaggccaaggctctatgaggaatgttcctttgcttgttcatttatttggtgggcatggattgaatgccgttcctctgccagacattgtgccaggtgtcccccttgaacagctgagcagttgtatttctgggtgatggaacgggctgctgataggactatgggactatgggctggtcacccctgctatcgtttttttttttttttttttgagatggagtctcgctctgtcacccaggctggagtgcagtagtgcgatctgcaatgtccgactcccggttcaagcgattcttctgtctcagcctcctgagtagctgggacgacaggcactcccccaccatgcctggctaatttttgtatttttagtagagataggggtcaccatgttggcaggctggtctcgaattcctgacctcaggtgatccacccaccttggcctcccaaagtgctgggattataggtgtgagctaccatgcccagccagccaccacgcccagccagccaccatacctggcctccctgctatccttttttttttttttttttccccaagatggagttttggtctgttgcccaggctggagtgcagtgatgcgatctcagctcactgcaacctccgcctcccagattcaagcaattctcctgcttcagcctcctgagtagctgggattacaggcatgcgccaatatgccctgctaaattttttttttttttgtatttttagtagagacagtggtttcaccatgttgaccaggttggccttgaactcctgaccttaaatgatccacccgcctcagcctcccaaagcgctaggattacaggtgtgaggcaccgcgcccggccagccaccctgcccagcctccctgctatcctttctttctcccacaactatccattgtgatcctgctctgggtcaggccctcaaggaagaccagggtactgcctccatgggccacacattctagtgggagagacagacgataaacatgtaaacgcagagacaagagaatttcccaatatgaccagcgtgctgaagaaactcacacagggcatcgagatcatgagcagccagtgggtgtgtggggactctggaagaggtggaagtcctctccaagaaagtgacatgtgagctgagtcctgaagggcacaggggcgaccacataaagaagctgctggtgagaggtgttaagtgggtggtggggagggggcacggggcatggggtggaagagtccttctgcagggggagcagcaagtgcaaggctgttctagaagcagaaggccattgtagctagagcagagtcatgatccacagggtcaggaggccatgacccacagacagaagcgaaaacttctgtgcaattaaaggaacggctttctagcacttagagctgcctgaggatggagtgggctgccccgagggagagaacttcccatcactaagccatagtcaaaggccgctgtccacggaggttactgaggatgagactcaagcatcccaaaggttggctagaggacccttcgttccttctacgccttcacgttcaggagcatccttggtttggcggaagctggggggatgtctatggagtgcatgaatgaaagttccaggccgagcgcggtggctcatgcctgtcatctcagcactttgggaggccgaggcgggtggatcacctaaggccaggagtttgagaccagcctggccaacatggcgaaaccccgtctctactaaaaatacaaaaagtagccgggtatggtggcgggtgcctgtaatcccagctactcggcaggctgaggcacaagaatcgcttgaacccgggaggcggaggttgcagtgagccgagatcgcgccactgcactccagcctgggggacagagcaagactctgtctcataaaagtccagcctccagatcccaggcagcggggagtttcaggggtctgagcagccctggagactcgcagcatagcgttctgtaccccgtcccgggtcccgcgcaacgcagagctagagggagccccagagtatcttcctcagtagatcaggagcccccaggcctcaccgcacctcggttccccattgcccccattgcccccattgcatcttccaggaacccctggcgggcaggctgctccttctctccccgggtcctctgggtgcacctgccccgccccgcgcctttgttccggaggagccgccttgggcagcccccagggagctcaggacccgctgtaccccctgccaccgcctcccggtgcccgcccctccgccccctctccgcggctgcgccaggcgatccgcaggcagcggcacagggaccagggcgcgccccgggtggcggaggcgcggcgagggcgggagcacgaggaccccggaccctggatcggcgcgggctccggctgcgcgtgcgcggcggcggcggcgaggggcgccaggtgtgcgggcggtggcggctgcggagggcgcggctttgtgcgctggggccggccggggtgcgcgcgtgcgcggcaggactgctgcgagggaccccgccgccccggaggaggaggaggaggaggaggaggaggaggagggggctgggccgagggagggggcgaccgcggggactgaggtgcccttcgctccgggtccagaggcagccgcgcgccaggcggcgcagaaggtcagtggccccggggctgggattccgcagccagcctggatcgggacgtgagtcctggtgtgactgacggggaatcggagcgtgtgtggagtgtgaacgcgtgtgtttgcagacagacatcggcacgtatggacggcgcgagccggtactgcgttccggaggagccatccggcgtcacaggctgtgctggggaggtggggtgaccgtcctcagaaacccccgcgggcggggcgctgcacacacgtccacctatagggtgtgtgtgcgtgcgtgaggtgtgcagcccctgtcaggatctggcgagagaagctgaccgggatggaggtcagaggtagggtgtttacaggtggtggtagaaggaaaacagccaggaaccccaggaggaccctggagctaggctgggcttcctgaaaccccccatcccatcctcgctccagcctgtgcctattgcaggaagaggagctagggaggtgggctgccggctgagaggccttgagggatctttgggagcggggcccgatttcagcctgatcctcatttccagaggcctggatgggtgtgggggtgccggccctgagtggggggtccagggcaggcgtgtgttcaggagacctcaggggtccgtgtagactgtcctctggctttgccagcaccaggtgctgtgtgtctggacctgggagctggctgagggatacccttgcttcctctcatttgttttctatagctccccctacatgcttgttaacaaacctgaagggcacttgtatgccagtggggtttgctgggatgtgccctgttgaggggctgtcatcagagaagcctccatggggaatgagagagttgtcctgagccaggtgccagggctcttgggttctttgcctgcgttgtgaccctggggccatccctcaagccctatacgcctcagtttcccatggcgctttgccctcccccttcttcctgttgcagggtggggagtaaacagcttgcacagctgccaggaggctgggaggctgggaggcggggaggctgggaggctgggaggcggggaggctgggaggctgggaggcggggaggctgggaggctgggaggcggggagtgactcagggtctgtgaggtcttgggcagcgatttttcaggcgaaagtcccagcacatcttctcgacttgggcaggagttgggggaggctctgccctcagctccaagctgtggtgctgggttttctgagtcctggggtggggtggggtgggcatctgttggatttggctgctcaggcttcaagaagctgcctctggtccctccttcttcccagatatcaagtagttggagagggatggggctggggggcctggtagctgggtgggatgcgggggcgggagctgaagtgctacagcagcctctcttggttcctgtgtttgatgttactgggcagagacagatgctaagcttgggtagggtcggggctggtctaagtgggactgctcagctcagcatgttgaggcaatttggtgggaggtggcctcagctccagagaagaggaccctgctgctggaggcacgcttgcagctctcctcaccctctttcccatgaccctgtctgatcaactctggctgagccaccatggctcagaatgacttgagccttgagggaaagggaccctggcatggatgggggtggtggcagggtcacatagtggctaagcatgaaggccctgctgtcactcagacctgggcgtaagtcccagctccatcacctactgctgtggccgcacctgcattcccctcaatgggagcccgagagaaaggcttgcaggctgtggcttatttgggaagcaatctcaggaaacaagggcgaggacatggggtttgaaggagagggaggggaagcaacaatttgattattcccaccactctcctgggcggtgttctgaggagccttacagacagaactgctctgttggggagagaaacagggaagcacttacccattagccccatcccctgccagacaagggtggctctgtggacattcgctcccgtgtggacttccagattgcacatgtgtggggctcaagtggttccctgtgggtactccacacggcagcttccaagaaggcccagcgtggcctgacatgaagcactgtcccattgcacctgtaagatgctgcttggagcctgtggggacctggtcattgcagaagtgtttggagtgagaggtggggccaagagggctggaagcagcacactgaggtgcctaacactgcgtgaccttggccaaattacctgacttctctgagcctcggtttccttagctgggtgttttaagtgttaataaggcatttattgaatttttgaacatggtgatggccccatagcaagggcttcacccggggtatttctgtgtggccaggaagaccacatgcccagggtggctcagatagtcattcactcaagtggaggtgggtccgcataagaggacctctaaagacccctcccggtcataggacctggggctcaggggccagactgctgacctggtcagttcctctagggctgtggcccagtttcccagacctcctgaatgcttccatttcacagcctatgaattggagtcagcgatgtcctgctcctgggctggccgctcagatatacctcttcctgggctctgcctcaggaggacacagaggccagcactgggcagaggagggcgaggggagaggacagctcagaagcaggtgcttgaaggaggagtggagggagggtggatgctggcatttctggcattgggagctggcatacggtcatgggcatgggtctgggccatagtcagtgggggaggacaaggcagggggctgggggggggcaggaaaggaaggtgagcgggttggcagaaggtggccaagaagcatggaagagacagggacagggagtgggttgggcagccttggcgtatggggattcacagcgtctggggtggtggtaaccaaatgggagggggatgaggtggcaggaaggaagggagggcattgggtgaggtctagctgggccttcctagggcgtaaactggggcagtgttcgtagttcgtggtacagcatccacaagcctcctcgttccttttttttgagatggagtttcgctcttgttgtccaggctggagtgcagtggcgcgatctcggctcaccgcaacctccgcctcctgggttcaagtgattctcctgtctcagcctcccgagttgctgggattacaggcgtgcgccaccacgtcctactaatttttgtattttcagtagggacagggtttctccatgttggtcaggctggtctcgaactcctgacctcaggtgatccgcccgccctggcctcccaaagtgctggggtgacaggcgggagccgccgcctctggcaaaagtctcttcatccttttttccacggtgtccacctgcccctcccaggccaccgccccgtttgacaggggaggagttgtttgcaaacagttcctgttatgagcggcgattggagaaggtccacaggtgcctttgccaaggcctgttgccatggtggcatggtgggccttgtctgcctaccctctcccatctctgagcaatgtgcaccccccccaggagaggtcacagagtggggaaggtgtccagctgcctctttgctcacacatggccagctcaggctggccttacaaaggtcactgcgttcatccctctgcctgcaggcagggtcacacccagcctatgctgggagacccagcagccgccgtcttcattacagccatttaaagtctactccgatctctgcaatttgtttttaataagtttaatgaaaaataaagcaatgatactagcctattcatctgctccccttttaaagcgggcatctcatggatgatactcttcttgtccacacctctctcagtgctttggtgcctgtccagtaggaagttctgcctcatgtctgatctcagcctgacatgctgtactgtttttgggtgtgttttgtgtttctgattttctatttgttgcaacccttcagggattccagatggttctaagggcattcctgtctacctgctcatgatctggagcagtcgcaggggcacccaaggcaggtgtgatgccaacgatacaaggctgtgccgagcccctggccccggccacgctctggttctggacttttgcagcttgctctcagggccagctggttcccactcctttccctagttcagatccaggattactggcctccttcttggaccatgctgggcctgctggctgcgctctgccaggtctgggtcagcaagcagatggcagcaggcatgggcacttgggggactctggcacagtcagggccctgccgattagatggctggtggagagcaagagcaggaggggagagacagggagtgacaggcagtcgggaacactgaggtgtgcctgtgcatgtggacacatctgtgcttggtgtgcacgtgtggccttggagggcttgttgctggattgctgtgtctggacatctctgggtggttatatgtggttcttctgagcacacccctgtgtgtgcaccgtgtgagcacgtctctgtgtgagcacgtctctgtgtgtgcacgtctctgtgtgtgcaggtctctgtgtgggcacgtctctgtgtgtgcaggtctctgtgtgagcacgtctctgtgtgagcacgtctctgtgtgtgcaggtctctgtgtgggcacgtctctgtgtgtgcaggtctctgtgtgtgcacgtctctgtgtgagcacgtctctgtgtgtgcacgtctctgtgtgagtacgtctctgtgtgtgcacgtctgtgtgtgcacgtttctgtgtgtgcacgtctgtgtgtgcacgtctctgtgtgtgcaggtctctgtgtgggcacgtctctgtgtgggcaggtctctgtgtgtgcacgtctctgtgtgtgcacgtctctgtgtgtgcaggtctctgtgtgggcacgtctctgtgtgggcaggtctctgtgtgtgcatgtctctgtgtgtgcactgttgtgtgctctgggttgttcatgggtactttctctggatatgtgtgccagccacctactgggtgtctccagggttctcaagagtgtgcccatctggatggcaggtgatactttttccctgcaggatttcctgcccccacggaggctcccttgagtcttctgccatgccccatcccgccctctctccaggcttccttatcctgtttctccctctgtctgaggaagttgcttctccccctctggctgtgtgggcgtccactgccttctgggcagggcctgaagagggacggcaagtccagcctccagccccatcctcccgagctctgagctgagggtgatgggctcaagctctgagttgaggagatgagtcagggatggctgcagggggtgggcagaagtggcctgtgtgtcagcatgctgtagggaagtgtgtgctcttgcccccctccacctgacccgccctcagtggcttgggcaccagtgcagctgtgatgaggctcccttaccttcatactcttccccagtagccttggttggcacagtttctgatggggagcagagtggtctctggggctccgggcatccaatgggggccttggccttagcataatttatctcaccataatcactggtactaatggagctcttcctgcaccaggccctggactacacactgtacatgtaatcagctcatttactcctcagaacaatcccatcccaggggatagtaggtcctattaggtgggttcgaaaacatccctggccaggcgcggtggcccatgcctgtaatcccagcactctgggaggccaaggtgagtggatcatctgaggtcaggagttcgtgaccagcctggccaacatggtgaaaccccgtctctactaaaaatacaaaaaattacccgggtgtggtggtgagcacctgtaatcccagctactttggaggctgaggcaggagaatctcttgaacctgggaggtggaggctgcagtgagcccagatcgtgcccctgcactccagcctgggtgacagagtaagactccgtctcaaaacaaacaaaccatccccattttatgaggaagttttcccattttatgaggaagtagaggctcagagagcctgggttacttccacaaggtcacacagctagtaagtgatggagccgggttctgaacccagacccgttcttctgctgttccctccgctcttcacaaagctgtgaagctgtgtccgtctcgtcttggcagtctccctctcagagaggccatcccagatcaccccctctacacaggactccctagccatctggtcccatttggatcggatcaccctattgtaaatacctgcataaaggtagccctcatttatcctctacttcctaaccccctcttccccacctagagcagggacctgtctgtcttgcttactaaaatattcttagaactggaagacagcttggaacacagtagggatgcaataaacatttgatgaatgaatgaattaatgaatgaagagaggactgactccagacctaagcttgaaatccctcctatatactgtctcttacacaacagggactgttgcagagtggcaggagcacaggctctggagccagcttgcttggttcaaattctggtcctgccagtgttctggttatctaatgctgcttaataaaccacccaaagcttatggcttaaaacactggtgacactgattttgcccatgaatctgcaacatgggcagggttcagtggggataacgcttctccactcagcattgtctggagtgtttcaaggtctaggggctgaagccatctgaaggcttagtcgctcacacgtctggcgtttcttgctggctgttggctttgggtcagttcctctgcacatgggcctctctatgtgctgtctccacatgctagattgggcttcctcccagcatggtggctgagctaagggacaagcatgcccagaaagagagccaggtggaagctatttcactttttattttatttgtttatttattgagatggagtcttgctctgttgcccagggtggaatgcagtggcgcaatctcggctcactgcaacctctacctcccgggtttaagtgattctcttgtctcagcctcccaagtagctgagactacaggtccatgccaccacgccaggctaattttttgtatttttagtagagacgagggtttcactgtgttagccaggatggtctcgaattcctgaccttgtgatctgtcctcctcggcctcccaaagtgctgggattacaggcgtgagccaccacgcctggcctatttttatttatttagagacagagtctcgctctgtcgcccaggctggagtacagtggcgtgatctcggctcactgcgacctccatctcccggactcaagcgattctcctgcctcagcctcccaaatagctgggactacaggtgcctgccatgacacctggctaatttttgtatttttagtagagacagggtcttgccatgttagccaggctggtcttgaactcctgacctcaagtgatccgcccgactcggcatcccaaagtgctgggattacaggcgtgagccaccgcgcccggccagcagtttattcttttagcagcagctacacttttgctcactgatcccctggccacaggtgaggcttgggtctgtccccagatccccgcctactctcatgtagtccaggaggcatcttactgtgcagagccctgctgagggtggggcccgtaatgagagaagggggaacttgaatgggaaaggccttttctgtcccagtttattatctcattacaggtcagccctgctcccttcaaggggcctgggacacatgttgctgatggagataccatgagggtggggctcaggcagaattgctctgggcttggggctgggatgaaccccaccagacccccatctttatccaggaaaaatcaagatggtgaggcctgaacatgctgtgtttgagctgagggagctctccgcttctccctgtccctgccgcctgcttccacctgagtcactgttcatctgcctgcggcatcatccccctgcggcatcatccccctgcctcgcttgctggcctcagggaggaatctcagggtttgctccttgtggcccaggttagggctgctcctgagcagagcgttggcagggggcccaggaagaatctgggggtttgcacgagcccagcctggcagtgtctcccatctaacgcagccctcatttagggcctgctctcctctgagccttccctgaaggaatggcagaagggctcaaagggggactctgggtttgaattctgtcaccttccagccctgttaaggaaggagaccactgctcctcctgctgccctcctgcccccaccttgcctagttcacaagataggaggagagaaaaagcaaaaagttggaaaaaaaaaaaaagtaagataaatagccagacaaccttggcaccaccacccggccctaggagttaaaaaaagtgataattataacatcaacccctgacctaaactacttttgttatctgtaaattccagacactgtatgaaaaaagcattgtgaaactttttgttctgttagctgatgcatgtagctcccagtcacatttcccacgcttgcttgatgtatcacgaccttttcacgtggacccctttaagttgtaagcctttaaaaaggccaagaatttctttttcgggaagctcggttcttaagacgcgagtctgccgatgctcccggccgaataaaaacctcttccttctttaatccggtgtctgaggagttttgtctgtggctcgtcctgctacactgtgaccttggacgagtctcttaacctctctgaggctccagttacttaccaggagggagactgtggtatggtaaagatgaaaggaagtaaaaagtatgacttttttttttttttttttttagacagagatttgctcttgttgcccaggctggagtgcagtggtcagatctcggctcaccgcaacctccacctcccgggttcaagcgattctcctgcctcagcctcctgcgtagctgggattacaggcatgtgccaccatgcctggctaattttgtatttttaggagagacggggtttcaccatgttggccaggctgatctcgaactcctgacctcaggtgatccgtccgcctcggcctcccacagtgctgggattacaggcgtgagccaccgcgcccagcctggagttattctttacagatgaaaaacctgaggcagagggagtttaagtggtttcctcacagctacatttaatgtcaggactggggctggaatccgtgtgttctgacaccaggtggtggttgcttatcttttgcaggaggaggatttccccctcccttcaaccccttccgccagagggcaacatggctgccatcctagaaacaagcccaggaagacgctccctttcctcctcgcaccacccaagcttgcctgcagagggcgcaaacgcccaccttctggccggtcctgggaggcgccaggtgccccgccttagcaggggagggcgggagtgacccagctgggtgggtgtgggcagagttggctgtgtgttctcctttagtgagaagctccttcagacagcccccacggtccaagcctttcttttctttttttttcttcaattttttttttttttaatgttttgcgatggagtctcactctgttgcccaggctggagtgcagtggcgtggtctcgggctcactgcaccctctgcctcccggattcaagcgactctcctgccccagtctcctgagtagctgggattacaggcaggtgccaccatgcccggctaatttttgtagtgtttagtagagacggggtttcaccatcttggcagggctggtctcaaactcctgacctcaagtgatccacccaccttggcttcccaaactgctgggattacaggcgtgagccatcgctcccagcctttttttttttttttttttttttgagatggagtctcgctctgtccccaggctggtgcgcaggggcgcgatctctgctcactgcaacctccgcttcccgggttcaagccattctcctgccccagcctcccaaatagctggggttataggcgcatgccaccatacctggctagttttgtagtttttagtagagacagggttttaccatgttggccaggctggtctcgaactcctgacctcaagtgatccaccccaccatggcctccaaagtgctgggattacaggtgtgagccaccatgcccagctttggtttttttttttttttctttttttttttcgagacagagtcttgctttttggccacactggagtgcagtggtctttactgcagccccaacctcctgggctcaagtgatccttccacatcagccttctaggtagctgggaatacaggtgcacagcaccatgcctggctaatttaaaaaaatttttgtacagatggggtcttactatgttgctgggactggtcacaaactcctgggctcaagcaatccccctgccttggcctcccaaagtgctaggatgacaggtgtgagtcaccacacgctgagcctgtttttttgttttgttttgttttttttgagatggagtcttgctctgtcgcccaggctggagtgcagtggcgccatctcagctcactgcaagctgcctctcccaggttcacgcaattctcctgcctcagcctcccgagtagctgggaatacaggcgcatgccgccacacctggctaagtttttgtattttcagtagagatggggtttcaccatgttggccaggatggtttcaatctcctgacctcgtgatctgcccgcctcggcctcccaaagtactgggattacaggcatgagccaccgcgcccagcctgtgcctgttttttaaaacttgaacttttagcatatcttcatatattaacatatattaagtgctacctcgttattttcagtggctagatagtattccattgtacgcttattctgcaatgtagttaatcctcagttgatgatcatttagattattttttgaatttgctattataatgatatgattaacatctgtatacatagatcttgtcaagtggtatgagttaacctgtgcaataaatttctaaaaacaaaattgttggcataaagggtatgtgcacttaaacaattttgatagagtgtattagtcagggctttgcagagaaatagaactaataggaaatatatacatatgtatataggggtgtgtgtgtatgtgtgtgtgtgtttagatttattatgagggattggttcatgcaattttgtggggtttttttgtttgtttgctttgagatagagactggctctgttgcccaggcaggagtgcagtggcacaatctcagctcactgcaacctctacctccctgattcaagcagttctcctgcctcagcctcctgagtagctgggattacaggtgcccgccaccatgcccagatttttttttgtatttttagtagagacgtgggtttcaccatgttgatcacactggtctcgaactcctgacctcaagtgatccacctgccttggcctcccaaagtgctgggattactgagccccagccaggcatgagccactgcaccccatcaggttaatgcaattttggaggccgagaagtcccatgatttgccgtctattagctggggatccaggaaagctggtggtatgttctagtccaagtcctaaggcacaagaacgaggagcgttgatagctgagggcaggagaaggcgggttctcagctcaggcagagaatgaactctcctttcctccacatttttcgtctattcaagctctcagtggattggttgatgccggcccacattggtaaagcggcatcttctttacttagtctaccaattcaaaggctaatctcttccagaaacaactcacagacatacccagaaataatatttcaacagctatggagatatcccctagcccagtcaaattgacacataaatttaaccagcacagagatattgcccaatagctacacattaatgggacgcccgtttccttatacctttacacaattatcaattttttctttttgagatggggtctgggctctgtcactcaggctggagtgcagtggcccaatcatggctctgcttcctgggctcaagtgatcctcccacctcagcctcccaagtagctgggactacaggtgcctgccatcatgccccactaatttttgtattttttgtagacatgggggttccaccatgttgcccacactggtctcgaactcctgagctcaggtgatccacccgccttgtcctcccaaagtgctgggattacaggtgtgagccaccgtggccggcattatcaaatttttaaaactttatctgatgggtaaaagtgataccttgttattatttaaaatttttaactgtagtaaacttcgtagcttctttagttcagagccatgtgtggctaaaactctcttggcagatggaccttactgaacagataagaataaactgcaataattttgggaaactgaggcgggcagatcacctgaggtcaggagttcaagaccagcctggccaacatggtgaaacgactcacagacagtctctactaaaaaaaaaaaaaaaaaaaaaaacattagccaggcatggtggcgtgtactggtagtcctagctactctggaggctgaggcaggagaattgcttgaacctgggaggcagagactgcagtgagccgagattgcaccagtgcactccagcttgggcgacagagtgagactccatctgaaaaaaaaaaaaaaaaaaaaagtaaataaataaattgtgcaattgtggtatatgtctgggccctgctcttggaactcagtttttacaagccctccctttgcaatctgccatcatcttgcttttcagcacttgtgcaatgggaaatttagtctggaccttgagatagtgcaggtgggcagtgatctgtggactgtaaatcactatgcagatgctaggtgctgtttttatcttgaccctgaggcgtgaattcttcactaatgtggggttgctggccctgaatgcccactgtgccctgtttccctggagaccagcatctttctccatcatccttttttttttttggtggttttgagatggagtctccctctgtcaccaggctggagtgcagcggcatgatctcagctcactgcaacctccacctcctgggttcaagcaattctcccgcctcagcctcccgagtagctgggattacaggcatgagccactacacccagctaattttgtatttttagtagagacggggtttctccatgttggtcaggctggtctcaaactcccgacctcaggtgatccacccgccttggcaggtgtaatcccaaagcgctgggattacaggcgtgagccaccgcacccgacctctctatcaccctttatcttcatatggtttatgaaggaagcagaggccagtctaagtctccccttggatgactagtaggctgaagtctcaaaagagtaggtcacctgcccccagtgacttagaggtggatctgggatgagagctgagctccagggggttagtactggggctggaatgggtactactgtctggatgggggaggatctgggtcagaccacctagtgcctgcttcactcgggacatctgtttcctgagcttcctgtaactgcctcatccccatgcctggggaaggagcttgtctcatctttcagctcccactggtggctatgaggtctgagctgctcgagcagaggaaaccacattgtcccttcctcccgtcctgccccgagggccaggggacacagtggaggggctgctgctgacaggagcctgaactgccccctcctctgagcccagccagctttcttggctctacctgcctcaaaagcccgtagaggccgggcgctgcgagcgccgtggctcacgcctgtaatcccagcactttgggaggctgaggtggacggatcttttgaggtcatgagttcgagaccatccaggccaacatggcaaaaccccatctccactaaaagtacaaaaattagccaggtgtggtggcaggtgcctgtaatcccagctactctggaggcagaggcaggagaatcacttgaacctgggaggcggaggttgcagtgagctgagatagtgccactgcactccagcctgggtgacagaacgagcccccttctctaaaaaagaaaaaaaaatgcccatcgaactgggtgagttccctggagctctgccctggggttgggactctggctgggactttgccccaggctggtccccgagaaacacctacagcccttgtgaactgtgacccacagcaggctctgggaagcgttttgagcctgagagagaaggagcccgtccagccaggcattgggggtagctgggtacttgctctttccatcttcattattctctccccagtgatgagctgagttttgctttaggaccttacttttcctgtctgtaacatgggcactgatgcactgtgcatttctgtggatccagaattagtggggctgataatcatcaagctgggttaatttggttggattccttcacttccctgagcctcagtgttcctatctgtaaaatgggataacagggcaccctctcagaggggttgtgaggctgaaaagctaagcgctttggtccgcgctggcccacaggagactcacagatgccggtgctgccctggctctcttgtgcccgcagctcatcctcctctccccgctggctgctgagagtcagctgagctctgggaggaagctgggctgtgcttgatggggccaggagggctgggcctgcttcacagaccgcttcccttttctctcttttttttttttttttttttgagatggagtctcactctgtcacccaggctggagtgcaatgtcacggtcttggctcactgaaacctccgcctcccaggctcaaacgattctcctgcctcagccttccgaggagctgtgattacaggtgcccgccaccatgcctggctaatttttgtgtttttagtagaggtggggtttcaccatgttggccaggctggtcttgaactcctgacctcaggtgatccgcttgcctcggcttcccaaagtgctgggattacaggcgtgagacagtgcgcctggccgcttcccttgtctcttgactcacaatccttcccagggagcccacagtctccttgctgtgcacggcacatggaagaggaatcacagggtcagagcagggggtcaagaagctgcgcgggactgaagcagggacagaatcgtccttgacagtaatgatagcagctcccgtgacggccttggagccccgtgctcagtgtttctgtttgctgataaactcgtgaaggtggtggcagcctccccaaattacagaagagaaaactgaggcctggagagattaggtaacttgcccaaggtcgctgggccccaaggaaggagaggaaggcagcgtgggaaaggccctaggaagactctcacaccctgcagggctcatgatgggccatgagccgtctgggagagtcccttccccctttccagccctcagtctggggacgtgtgggcccctggatcctcctggtttctccaaggttcctggatcccagcggcatcgaagaagtccaggctgtgggttctgcagggccggcagccgggccagtcctgctccttggccgggtgtctgactcaggagtgttgtttgtggctgtcaggggcacaccccccggtgggggaaaccagcctcagggtggcagcagcggaggcctcgaaacgcaccccttccctgtctccaggctgccgttcagatgtctgtgcctgggccggagtctgtcccggctctgggaacacttggtccaggtgttcatagctgggcatttacctggctgtctccatagaccgggaggccccagataaaagcatctgtcagctttgtcttcccctagaatgcatgcggcgggcagctttcacatgtggtcagtgtgggtggtgaggcgtgcccaagtgtgatgtgactatcaccccgcttctctctcatgtatgaaagcgcatcaacgtatactccaaagatgggcctgtcattaactccctctaactgattttttaaaaaagtaatttgcaacaggatttttttttttttttttgagatagagtttcgctcttgtcgcccaggctggagtgcagtggcgtgatcttggctcactgcaacctctgcctcccaggttcaagcgattctcctgtctcagcctcctgagtagctgggaatacaggcatgtgccacgacgcccggctaatttttgtacttttagtaaagacagggtttcaccatgttggccaggctggtctcgaactcctgacctcaggtgatctccctgcctcggtctcccaaagtgttgggattacaggcgtgaaccactgcacccggcctgcaacaggaattcttgcaacgtatgcaacacctccaaccccagcacctcccaactgaggctgtgggctgtacctggctcaccctggtgctttctgcacccagcatggtgcttggcctagagcaggtgttgctgtcagcggcgggaggccaggtgggctgactgttcccactttcacttgttcacttgtcaagctcttttctttagttgggactttattaatggagaatgaaagaaatccaactcatactggctttaggaataactctttattcgtacggctggctctcctatacccggggtcagctggttcctggcacagccggatcctggagctcagatgatgcccttgagactcaatcttttggccgggtgtggtggctcccgcctggaatcccagcactttgggaggctgagacgggtggatcaccggaggtcaggagttcgagactagcctggccaacatggtgaaaccctgtctctactaaaaacacaaaaattagctgggcgtggtggcgggcgcctgtaaacagatatgtgggaggctgaggcaggggaatcacttgaaccagggaggtggaggttgcagtgagccgtgccactgcactccagcctgggtgacagagcgagactcttcaaaaaaaaaaaaaaaaaagacatgatctttctcctctttccctttctctgtcagttctcttctctgccttcctgtgagtcggtttcattttccccacactctccacagccccaggctttcatctcatgcttcagcaggggaagcctcttgggatggtgtcttgttgggtttacttaggtctcctgaaccagtccccttggctggccaggcctggtcaggtgcccactcctgaccctggaggtggattgagtgcagagggttcttctcagatggaggcagggcaggcaggacccaagttgtccacggtacctgttgagcacttcctgggtgtgggtgggtgcctctggggagagaggcgcttgtggcactctgcagtggccatcctgtgggaagccagcagcctgaagccaccccagagcatgaaccacacaatcctaactttcctggggcagaggtgagggttgggggaagcctccgggctcctgctggggactagctgccttggaggtagagagtcagcccccagccctgctctggcccaggaccctgaagctgctcccccagcccactcagggcttgaggcccctgtgctgtcccctgctgtgaaggagtcaagaaaatagaaatccttgtacccttcgtccacaagctggggttggcccctggcacctcagcacggagtctaggaccttcacagtggcagcaggtgccagagaggaaatttcagggagggttggccagagagagaggccaatggcaccagctagggccgtttttttcctttttttttttttttttttttttgagatggagttttgctctttgttgcacaggctggagtacaacagcatgatcttggctcactgcaacctctgcctcccaggttcaaacgattctcctgcctcagcctccagagtagctgggattataggtacctgccatcatgcctggctcatttttgtatttttagtagagatggggtttcaccatgttggccaggctggtctcgaactcctgacctcaggtgatccacccgcgttggcctcccaaagtgctgggattacaggtgtgagccgccacacccggcctttcttcttcttctttttttttttttgagacgttttcttccctttctccactgcttgggggtagggtggggcctggggccctatctgtgcccactccccccagtgtctgttgtagtgtacgtgccacatccctttgaggggctgccattagtaagtgcctgctgtgtaccaggtgtggtcagcaccagtgcgtgcagagatgagcactggccctgtggtgtgcagactgggatgcgtgcaggacacgctagccctgtggcatgaggaccagcacctgagcatgcagagatgaggacgaaccctgcggttcagctgggaagacaaatccacccgcacatgggtaccgcccccccaccccacacagccagcgtgaagcatgccactgctctgacctctgtctagacacttggcggcgggggtggggggcggctgacaggtacagctctgtgcccatgtgtgtgtacatgcgaatgccccttgcagtgtgatgtggtctgagtatgtggatgagtgcctgcgggcacatgtgtatgcgttcatgtctgtgcacgtgtccaatggggctttgtcagtatgtgagaagcgtgtgcaggtgtgtctactgatgcctgtgtgaagtggtgtgtggatgtgcacgggagcgtgtgtgccgcgctgtgctcaggtgtgtacaggtgtctaatgatacgtatgtctgcgtgcatgtatctgtgtgtacctgggtatcctgggcgtgtgtgtgtccatgtgtgcatcccacgtgcccctgtgcccatgcgtgtgcatgtatacttacatccacgtgtgctagtggaatgacatgtgtgtggctggttcctctggcgtgtgccgagccatggtggggcaggcaggcaaaggtccctgtctcaggcagccctcgggagtgggtgtgaaggtccccagtgctcaggcgtccctgaggcttccagctgaatctttctgtccctcctaggcgtggctgtgggaatccttggggcgcctttgggttccaggaagctggggctgtgtgggccgggctgctaactggggctgtggagcaatctgccagccgagccccttccggagctgtgggttcctctgggtgtggggaagctgccctccacaacctcctcggcctatcttggtgcctcctggagtgcaggacacacctcccagctctgcagcctcacccacaggaagctcgggttgggggcaggcgaagagggaggtgccacgctgggctccccgccctgcaccggcactgaccccgctgtaccacggccctcttgcggacagccccggggacgtcgttgggacatcgctgggaccccgggctctgcagccacaaccatgtttggccggaagcgcagtgtctcctttgggggcttcggatggtgggtgacaggtgggagggtgggggaatgatgggagagaacttagaagtgaagtcttgttaagtgcattggcggccgtgggaacagaggggctcgggctgtgcctgagagctgggtctgctgacgccctggcaggtcgagatgcaggatcctggtggggacatcagagaccgtaagccttccccactgtccctgggcacaatctgctggcgaatcctggaggtctgcgccggctgcccgtggggaggtggatagcatgagtgtgactgcagttgaatgtgtgtgtctctgtgtccgcaggttcccatgtatgtgtgtgcgtgtctgggattatgtgtaagtgtgtgtgtgcgcgtttgagcctgtgtgtgcaggcgtgtgtgtgtggctgtgactgccagtccgtgtgaccgtgtgtgaggtgtgtgcctgtgcatgtgggcagctgcctgtctgcacttctggccttctgtgtctgtgtgtgcttgtgtctgcgtgtttgtgtgtgtgatgctcctgtctgtgctgttgttgtggccttgtggcaggggagtctgtacctgctggacctctgggctgcctgctgtcttgggggtgggttgtgagagaaggtctcccacctgcaccccaggcagcccaccctagctctgtcctagcctgagcagctgcatctgtccccagcctcctgcctggccctctggacactcttgcctctaagcttctgtctgggatgagggatgtgctttttcttcccggcggggggcagaaggtaggcacacgaaggccaaaggcttgtctctggttcccagtgctggcagcttcttcgcagctggggaacagagtctggtggttttcatgatcggtttcctttcagtgcctgggctgggggcgttgtcagactgggagagggccccgcgggaggtggccggggggtgtcccggtgtggaaaatggtggactaatgggggtggcacgaagggcgagggggagaggggctgtgttcctcggtaatttttcgcttccgtgtgtgtggcttatttccctcttcctcctcttcaaaagcactttgccatccatcctctggcagggggggactgtgggcactccatgtttggcagatgggatggtgcggatgagaagatggcacagcgtcgcctgtgtctgctctcgggccctccctgacgcctggatctgggagctgccaccccgagggtaggtgccagtgtccgggaggcagcagaggacttggcttctggttgggaggggtgtgtgtgtcttggctgtgggccttgcagggcagggcccagcaattagattgtgccctccaaggcccgcctttctctgggaggtgtggagcagatggaaggctggtcgccagaaagctccgggtgcacaggtcccggtctcagcctagcttcattccatatgaagccctctgtgttgagacccacagctccagagcacaaggcaaagccaggcctgagatttgaatctgggcaggtgagggggaagacaggagtgtggctgcccagggctgccaagatagaaagcagaattccaagttcttctctagcagcccttctcactggggcttccttaatgaaatgcacattcagattcaggaggtctagggtgagccgaaggtggaggaagagccctaggatgtcccagacgcccttgtgtgctggctcagtgtccactaggctgtgggttccaggagggcaggccctgccccgtcgcgttcacctggaagcctggcatgtcacacaggctcagtcgatgcttgtggactcatcgaggtcttttgcacacagcaggtgtctgcttggggccccttgaggttgacgggatggcggggccttctgggcttggaaggttaaggcagcaagaaagggggcgagactggggtttgggcctcctcatctgggatggctgtcagctgggagggggtgtcacggattcctggagccctggtccctccagacagtgaacagaatctctggggctggtgttttccaagctccattggatgcagggtggataacctctggcaccaggggcagacaaggtgatgagggtgggtgggatgggatgggagagggaggagtgcccaggagccttggcttcctgaaagggaaaggcccagcctcacagtcctctccatctcccatctcagcctctccaaaaccagagccctgccctcctgaggccacaccctgatgtgggaactctggtgggctggctgctgtgtaggcgtggtttgaaccagggctgctgtgaccacggtgcctgtaggtggtgcggtgggcggggctgacccgacagcggtcagaggtgcacgcaccaggagccccggttccagcggttccagcgccgactccaccttgaccattgaggaactctaatgggacacttcctctctctgggtctcagtttccccttgtgtcagtgggggatttctgccttacccacaacacagggctgttgtaagaattaggagattccttgagaaaatgtaaaacctaagcgcctgctgtgaggggctgccatccggcagctctgggttgcacgcgttacagcagagtgtggggctctgagtcctgctcggatctgggtgtctgtgcgttgaatgggggaagaggagggtctgcaccccagagcgggtggggattccagggtgagaccctcagggaccagtagtggaagccctaaggaagggactcaagaggacgtgtgaggaagaaactgggagagacgtgggccaggcccctcggggtgccgcttgctttgctgttgtaactgagatcagaaggtgctgggagtttactcagagtgaaaggaccccgtcccctagctccaggcctcagggtgacttgtgggctggctcagctccgtgtcctctcctcttccctggagctgtgactgtgggaagcctgaggcagcgctgggctggccagagaagggtgccggaaagagcctccagggtctccagcatgctggagccagtggcagttttagtgaagctgacagtgatggtgacactgatgatgacatgtggtgacatggacagtgatggtgacacgaatcgtgatgttgcaaaggcagcattggtgctggtggcagtgctggtgacagtggtggtcacgacccttccacaagaggagatactgacagtgggaacactgtccacctttctgcctctggagagggaggaggggcctcttcttgccagccataagggctggcatatgcaggggggtaaaaatagaacctcagcggcgctgtctccccttccagtgagggcgggcacaggctggggatggaggagctggctgtgagggcagtctgcagcaaacgtgatcttccccgctctgaacctctgtgcctgatacaacccaccagggtctgccccaggagcagggtctgcctccctggatggactggtggctccttgggcaggagggtccctggggctggggatgcttgcgtcttcccaaagcagacgcctgggaaatatggatgtccacctggcattcagattgacatccgtgctgacccctgaagccgggttgctgggttctcttgcgagggtagccgtaataaagggagaggctgcatacaaagtgcttacgatccctggacctgacgtgagatacctgaattcagactgggccagtgattttacctttctgagcctgggtttcctcatctctgaaatggggagaataataatacgcatgttgtagggtggtgtgtggccccagctctcccagcactcagaggcgtctctccccctgctagcggagaactggcccctttagccagtccctgacagagccctgctgtctggtggtttgggctgtcccggggactcctccatacagatgctatgtaggagtcttcagcctcagcactgaccggagcccttgcttttctcttggcaggatcgacaagaccatgctggcaagtctgaaggtcaagtaagtagcaatttcctgttctgtaaaggtcagagatgacgcggatcagagcgccgggcccttgctccccccaggttgtgggagacacaagaggggctgtcgtgtttgtcagattccagtccgagtccatggtgcttccagatcggaggaggctggactaactcttattcctggggtgttcagggagaggtagaggtgggaatggaatcaccaggggctagaatggtgggagtgtgtgtagcaggtgtaacattcagtcccattattcttttttttctttttctttttctttctttctttctttctttttttttttttgagacggagtcttgctctgttgccaggctggagtgcggtggcatgatctctgctcactgcaacctccaccttccaggttcaagtgaatctcctgcctcagcctcccaagtagctgggattacaggcgcccaccaccacacctggctaatttttgtatttttagtagagacggagtttcaccatgttggccaggctggtctcaatctcttgacgtcatggtccgcccacctaggcctcccaaagtgctgggattataggcgtgagccactgcgcctagcccagacccattatcttcctatcactttagtttttagatatatattgggctgggcatggtggctcacacctgtaatcccagcactttgggaggccgaggtgggtggatcacctgaggtcaggagttccagaccagcctggccaacatggtgaaaccccgtctctactaaaaatacaaaaattagctgagcgtgatggcacttgcctgtaatcccagatactcaggaggctgaagcaggagaatcacttgaacccaggaggtggaggttgcattgagccgagatcacaccattgcactccagcctgggggacagagtgagactctgtctcaaaaaaaaaaaaagaaagataattacattttttatcactttaatttttatgtgaactcccaatcctggcagtgactttctgacattccccgcctactaggacctgactaaacactccagggtatgtgtgtgtgtgtgtgtgtgtgtgtgtgtgtgtgtgtgtgtgtgtgtgtgtgatgtcagctgctcatcaagtcatttgttgccaggtatgtcagcatgggcagcctggccctggggctttctgaggctcccacgccagactcagggtgtgggaattacctgcctcggtttaccgtgtatctcttggtccgtctgctgaggtccgaagcaggcacagccctctcctagaacctctgacctctcttccctcaccaccttcattcctttttcctctgcgtttctggccaaaccattttgtctgcatcctgatctcctttttcttttgagacttaaccaaagtgtagcctgcgtccagctgcacccctcccatgaggcaatgagtactggctaaccatctgctccagtggagtgaattgaaaaggagggaaattctaggaggaaaaaagcattggcctctagctcaaaatattctcccggcacatgtgaattcactgttgcatggaaaattcctccaatgaatcgccctccttccgaggcagcttctctgggttgtcactcccccatctcggcagaaggttttccctgcctagtctccctctgtcatgccattcagttgccagccctggttgtgtatcccctggatgcaggtccctgggcaaagtacggccagtcttgacggttggcataaaagagggtcaaaataagaggtttcccactttggttggttttgttcaaaaaggtgaggctgggcagttcgcagggccgggatggaggacagacttttcctgcccttcaagagctttcagtttctctgttgagctgatgccaggaagctggatgtggtggttcacgcctgtaatcccagtactttgggaggccaaggtgggtggatcgcctgaggtcaggagttcgagaccagcctggtcaacatggtgaaaccctatctctgctaaaaataaaaaaaattagctgggcgcggtggcgggcacctgtaatcccagctactcggccgactgaggcaggagaattgcttgaacctgggaggtggaggttgcagtgaggcgagatcgcaccacagcctgggagacaagagtgaaatgccgtctcaaaaaaaaaagtctagagctgatgccaggagtgccatggagtagtcccgaaaggctgcctggaggaggtggcctctaaagtagctcttagagatgaagcaggatagtaggacccccatgtctgtgctggcttggcatggtgtgtgcatcagtgcagacccattcaatctggaggtgtcagggcaagtcacccgggacaagatgcttcccttctctgggctttagtttccatatcttttgtccagtggacacaataatgtctggttttcctagagctttctagagcatatttgcatactgagtgagacgccaggcatgaagcagagctgctaaggggtgtagagtggtcagagtgttcttttggtgctgttttgggacatctagttcaatctcacaagcacttatcgagggagggcctgtttgtaaatataatatctgcaacctggaagtgcaccagttatagggtagagtgaaaagctgggggcgtgggccagggttgagattgggaccccagtgaggtctctgagtgattatctgggaaggcgatattgggatgatagcttgggacagtgtgtagcactgtgttcggagttttattggttaagattcctttgattacaagaaacaaaaacccagtgtcatctggttacgcaaaagatggaatttatggggaagaaagcagggtgccccagggaactgaaggggaggaagcaaagccagagctcaggagtggttgaaccaggaactggaaacccgttgccatcaaaatcccagctggcttctttgcagacatggataagctgatcctgagattcacatagaagttcaaagataatcttgaaaaaggagaacaaagttggtgcactcattcttcctgatttcaaaacgtatcgcggccaggcgcgatggctcacgcctgtaatcccagcactttcggaggtcgaggcacgtggatcatttgaggtcaggagtttgcgacaagcctgaccaacatggtaaaaccccgtctctactgaaaatacaaaaattagcccagtgtggtggtgtgcgcctgtagccccggctacttgggaggctgaggcaggagagtcgcttgaacccaggaggtggaggttaccatgagctgagatcacaccattacactacagcctgggtgacagagtgagactatgtctcaaaacaaaacaaaaacagaacaaaacaaaacaaaagtattgcaaagctatggttattaagacagtgtggtacggacataaagatggacagacagatggatccagtagaattcagagttcagaaataagcccttgcatttctggtgaattgatgaggcagccaaatgcccactgttggggctcctgagtcaccaagatgcctcctccctctgcctttgctgggtgaggcatctctccttctacagcagctcactgcattccctgccatgtagcggatactcctgggctgcagcccaggctccctggttgccttggctccctccccaaggacctggtgtccttggtgcctccccaggtgtccctgaggcctgcagctctgacgacaggggtctggcctcaccgttatgaagcattcactgtgtgctcaggcttcgttgcactgttttcctgaggctttgcacccacctcatgaagcaggcaccaatcctctctgcattttacagataagaaagtggagactgagagagtttaggaaacccgttcaaggtcttcagggaggaagtcacagagttgggatttgaatctgggtctgtgttttgtgtgtggagctgagtggttctcacacctgcctcccgccctactttcccatattctttccctgatgttctcaggggctgtgtatatagaatccgtggccgcagaatgcacctccgcctccacgacaccgtgggtgagaaggccgcccctggtttgctggggcccatccccttgctggaggcctggattgaatggggtctgtggtgcctggatgagttggacactcagaagcaaggatttacttaactgcagtgcaggggtacaggggctatggagccacgttggaatgctggaggggaggtggcaacggtaccacgcaggagaaggaggcttgtgtgtgggatatagcctcaggctaacacacaggcaaatcgttcacctctctgggtcagtttccccgtctgtaaagggttggattagcgtccagccttctctcttccagccttgacgttctaggagtttgcattcatgccttgaatcctttcgtatttttctcaggaccttggtgatggtaggcgctcgctgttgagtgagtgaatgcatggctgtgtgaatggaagtctctgagagcaggggctctgtgcattacatccctgactccttagggcctacccagtgcctggcacaaaacaggttttcagtctgtatttgctgaatgaatcaacatgtgtcatcatggttggcccatcacatgcaggtggaaggaaggagagaaagaggcaggctcagcgtgtggggatccctcttctccagtccgctctgggggccagctgggcatgaggtccctgtcgggcaggtgcctggggttttcttgtggagctccttgaaggagcagccggaacgggaggatctgagctgggagcctccgagacactcctcttgtcctttatttcttttttgagaccgcgtcttggtctgttgcccaggctgcagtgcagtggtgcaatctcggctcactgcaacctccgtctcctgggttcaagcgattctcccacctcagcttcccaagtagctgggattacaggtgtgcaccaccacgcccagctattattattattattattatttttgtattttagtagagatgggggtttcaccatgttggccaggctgatctcgaactcccgacctcaggtgatccacccacctcagcctcccaaagtgttgggattacaggcgtgagccactgcacctggccaaaacctctgctcctttttgctaccctctgtgctctctccacagagacccctgcatctttgctaaagaaagagatgcgtgtatgtgtgtgtgtgtgtgtctgtctgtctgtctgctgcatgggctccagctacctgaggtgaccgtcatgcacaggggctggctgcggtggcctggagtgagcacgtgaatggttcagggtagcctgtctccactgctggagcacattctcatgcacactcctgaggggtggggaagtctaaaatccattgccttgtaggaaaaaaatccagcttaaatttaagtgggtggctgcagcccttggtccctagaagtggcacctctggagagggatgaagcccatgatgggacctgggtgcagctgtgctctgtgatttcttccctaggagaaggacggggagggcctggaggagctcctgcttggctgggccagcatgtcagttctactgtggtttggccagaagataccacacagccaccgctattctaagtttcagatttaaccagctaagaattgaaaatcctgctagaaatgaaggggccatgaaggacagggctcagtgtgtctccgggcagctttcctaggtccctggggactccagtgtcagctgctggagacattgtccatgagagcaggggcttgccacagccaggaagcttgatttcttctctgctacaacctttttattattattattattattattattattattttgagagggagtctcgctctgtcgcccagtctggagtgcagtggtgaaatttcggctcactgcaacctccacctcctgggttcaagcgattctcctgcctcagcctcccgagtagctgggattacaggtgcggcccaccgtgcccggctactttttgtatttttttttagtagaggcggggtttcgctgtgttggccaggctggtcttgaactcgtgacctcagatgatccacttgtctcggcctcccaaagtgctgggattacaggtgtgagccactgggcctggtctattattattatttttatttattattattatttttgagacagagtctcactctctctcaggctggagtgcagtggcatgatcttggctcactgtgacacctctgcctcctgggttcaagtgatcctcctgcctcaggaccatacccaactattttttttgtatttttagtacagacggggttttgccatgttggccaggctggtctcaaactcctagcctcaagcgatccacctgcctcggcctcccgaagtgctgtgattacaggcatgagccactgtgcctggtctgccacaaccctttaaactcaggcttccctccccatgctgtgagaattatgcacaacatggggcacgtttttgtggctaatttttgtatttttagtagagacggggtttcgccgtgttggccaggctggtctcaaactcccgacctcaggtgatccgcctgcctcggcctctcaaagtgctgggattacaggcttgggccaccgcctccggccgttgattccaatttaatgactcttttcattcaccagttgaaggccacacctaccaattcattcccccacctttggccactgggtctttgtttactgtagattacaagaattcttgaggcaccactacgatgttctagaaccctctggggccaactcatcttagtctgctcttctcctacacacctagggcatctgctgagagtttgctggggttgtcaaggacagggggagcttgaggtttttgggggtagacagctgagtcagttcagcctacatttactgggcacctacactctgcagggagacagttgccatggcacgggacaagggctgcgatgcccacagaaaggatggaggggggcctcctggagacctggtgatgcctgagctgtctccaggggtgcgtaaggtcagcagggaggagagaatgcactccaggtagcccgaccctcacgaaggcagtggggcgtgaagcagcttcagcaggtgggacctgggagcagttactattaccagacagaagcgagggtgggagtgcagggggctgggggaaggcaggccacgtctgggagggtaggtgagctatgctggaagtggggctggatcaaagggcttaggactaggggaatgctatggtgagctcgagtctgagagcccctctggctgactggaggggttagagaggaggcagggcggccaggaggggatattgagacagccacgtaaagaggtccccggagaccctccgctggcctgcgccctggggtgaggcctcgggaagttcgcactgtttccagcggggaggatcctggccattcctgtttggaggtggtaacctggggatccaacctgtgagatggaggcctgttaacaggaacctctcttgctttgctgagcttttttcctttcgcccagtaaatcccgttgttctcacccttctgtcgtgtccaagagcctaatctttcttggtggtgtgacaaggaccccgttttgagctgagctcaggagaaagtcccataatagcatggggctggagggagtggccttccctgcctggagctggtttggaaggtgtgggtgaaggtgagaagaagggtcagctgaggactctcagaaggcttcctgtgagcgctgggtggatgctggtcccattcatggagacggagaactagcgagtttgggcagtttgggcggggaaggagggagtaagactctgaatgtaaaatcttccctccactttccactctcctgtttggtctgtctgagacccaccatatacctcctgccctgtggaagggggcagaggagagagcagcatcctgagggccgtgggggctggtctgcggcctgggaagcagctgcacggcgtcccctcgctggcccggctcggctcctgggtgcctttggcaggtgagttccaggtgagcactggccggtgtggccgcccttgtgactgacagctggccacaccacagaacccactgttagataccctccaggtgggtcgaggagaatgtgcccatttctgtcttgagtggcagactctggttcgttgatttcttcaggatgggccctgtgcctgaggacagtgttggcatgtgtgggggcatgtgggtgtgtgcagatacgtgtaggcgtgtgtgcacgctcgcccatgcaggtggacgtgagcgctgagggcccatgtgggtgcctatgtggtgccttttttggctttagcgagttcctatggtaaccatgaacatgcctgttttgggatctggagtctcggggcgtgcgtggctgcagggagaagcagggaaggcgagcgcttagccggtggttggcttgatttcattaccaggcaccggggctgctcctggaggtaccatttgccaggcggcaaggtctgcagactccaagacccatgtgctcctggccctcctcctggccagtccctgccatgcccaggaagccctggtgagtccctgttctggtttctcattggacaaacagctccccggacttggccaggtcttgtgggtatctgctgatgggcaggcagggagccggctggcagccctggccagtaggtaccaggaattggggctcttctgagatgagtgtgggacagtgggcaggaggggctttgcctattcacggagcccgtgagggtgttttccatgtggctggtggagtggcatggtccttgtgggtcccatggacagggctaaccgtgtgagtgtgagggtatgggcaaggacgccggagaggaaaatgtggaccgggtggcctgtggcccgccagccgagacccaaccatccccggaggcccccctcacccctctcagctccccgggtcctcatgaacccccaggcctctggccatgcacttgggcttcctcgctggtctccccaggcccagaggcctgctggcctggcctggatgggaagactcacggtcctgtggaagaggccagagggctctgcccggctcgctgggagctggatttggccaaggccggggaagaattgctcccacttggctctggagaaagactcgtgcctccccagattgtgcaccccctggtgcttcttgtctacacactgcagacccatgggtgtgtcaggacacccctctccagccaccgcgggagaggctcttgatggacaggggcccaagcagccctcaggggccgtacagagacgacgctggtgtctgggagcggggtggcaccttctatccccttcctcccgctggctcctctggggcagctagcagggagttggggatgtgagtgtcaataggggctgtcagtggcccctctggcttgtgctgggaccctcccctccccccgccccaccccaggagttccttcctctgcctctgagaaggctctgggtgaggctatgctgggaccgggggctgtgtgtggagcaggagttgctagggctggacagagggctgaggccctggtgaagggcgaggggagcaaatgtggaccttgcgagctttgtctggaccaccccggccttccctccctgggaggcagagtccagaacctaatccccgatggccttccctgggggcgctgggagagggagaggggaaccttcaggagagacccccagatctctagagtctttgaatcttagggcttgagatttaaaaagtcaaattagtcgttttttttttttaattatactttaagttctagggtacatgtgcacaacatgcaggtttgttacatatgtatacatgtgccatgttggtgtgctgcacccattaactcgtcatttaacattaggtatgtcttttaatgctatccctcccctgtccccccacccttttttttttttttttttttttttttgagacggagtctcgctctgtcacccaggctagagtgcaatggtacgatcttggctcactgcaacctctgcctcccaggttcaagtgattctcctgccttaggctcctgagtagctgggattacaggcatgcgccaccacacccggctaatttttgtatttttagtagagatggggtttcaccacgttggtcaggctggtcgcaaactcctgacctcgtgatccgcccgcctcagcctcccaaagtgctgggattacaggcgtgagccaccgcgcctggccaacaaaagtcaaattagtctttatgcaaatctcctgtgcccctaaaactagtcacccaggctgagcttggttacctgtggggacagtgagctcattaccttgtatggatgcctattttattgtagtacaactttgctcgaagctgaccgctgttttcatctggaatctctgtaactgcattgctcggtccagtcttgacccttggcccgcacgtccccacttacccccattcaacaaggttcacccctctttccactaagagccctgcagacactggaaggctgctttttcaccctgagtcttcccttccctccccttggctggtcaccccggcctctgcagctatatttgggattcctcacctgcctgggctgatctttgtcggaagggttcaggttttgcaggcaccctgcaggagccccatggacacgaggatggacagctagaggcgatgggcctcaccctccttatttacagatcagtaagctgagaccctgagcaggggtgctgctaacttgcgataggacaacacagaggtggtcagggcagggtcgggacgtgaggggctgctcttgtcgtctgtgacgtgctggcccctggttcttttcctgcttctccatcagctccatccttgctgctttctgacttggaccctcagctcttgggcactgcaagaatgctggcctgtcttagcggatcttccattttataacagcagctggaaatccgtttctttgtgtgtgtatttttttgtttttttgttttttgagacggagtctcgctctgtcacccaggctggagtgcaatggcacgatcttggtgcattgcaacctctgcctcccgggttcaagtgattctcctgcctcagtctcccgagtagctgggattacaggcatgcgccaccatttctggctaattttttgtatttttagtagagacagggtttcaccacgttgagcaggctggtcccgaactcctgacctcaggtgatccgcccacctctgcttcctaaagtgctgggattacaggcgtgagccactgcgcctggcctgatttttgtatttttactagaggcgaggtttcaccatgttggccaggctggtctcgaactcccaacctcaggtgatccccccagctcggcctcccaaagtgctgggattacaggcatgagtcactgcgcctggccggaaatctggagttttagacaaaatcttgacaactaactgcagactttaaagaacagagctggccgcagcctaccctgcagaccagagtcagccggaccctctgctctgctcacctccttaggcctcagctcttgtttctttgtggctgactcccaagtccctctccccaggtcatccccaagaacagtgctcttgccccgacctcagtggctggctggtcatttcggctctgttcccagactgaactgactctcaattaaccttttctctctttcagatccagttcttttctgtcactgggttgagaagcctctgagtcatgggggggtggttcctcctgtctcccggttcaggcccattatctcctgcccagtgacacaggctttctaattaacctcctcctccggtctctgccagctgtgactaactcttcatccctcaagctggctccagctctgccttccctattactagacgctggcccgaaggcagaccttgatagtgctgactctgatgggcttctcatgccaggatgctggtgtagggacccccagcccccatctggtggggggctgtctttgggtcacagcaaatagtttgtttgttccttccttccctcccccaggacggtggttctcaaacttttctacaatttggtttcacctggaggtgcttttaaaaattctgatgccggctgggcgcagtggctcacacctgtaatcccagcattttgggaggccgaggtgggtggatcacctgaggtcagaagttcgagaccagcctgaccaatataatgaaaccctgtctctactaaaaatacaaaaactagccaggcgtggtggtggttccctgtaatcctagctactcaggaggctgaggcaggagaatcgcttgaacccgggagatggaagttgcagtgagccgagatcgcaccattgcactctagcctgggtaacaagagtgaaactccgtctcaaaaaaaaaaaaaaattctgatgcccaggttgtacccagttccaattaaatctgaatgtcggagggtagaacccagcatcagtacttttttttttttttgagatggagtctcgccctgtcgcccaggctggagtgcagtggtgcaatcttggctcactgcaacctccgcctcccaggttcaagcgatttctcctgcctccgtctcctgagtagctgggattacaggtgcatgccaccatgcccagataatgttttgtatctttagtagagatggggtttagtagccatgttggccaggctgacctcgaactcctgacctcgtgatctgcctgcttcagcctcccaaagtgctgggaatacaggcgtgagctgcggtgcccaactatacttttaaaagatcccccgttcattccaataggcagccaaacctgggaagcacttccccaagggatacacaagtgtggtgaccgtcagtggttgggcaatgactcaggtcaggctggatgttaaaatgggctcctggtgggcgtgagccctctgggccagggcttctggtaacatttgaggctggctgactctttgttttacggtgccatcctgtgcgttgtagggtgttgcgcagcctctctagcctgtatccacaagatgcccacaacccacccctcactgtgataatgaaaatgtctccaggccaggcatggtggctcacaaatcccagcactttgggaggcccaggcaggtggatcacctgaggtcaggagttcgtcgagaccagccgggccaacatggtgaaaccctgtctctactaaaaaagtacaaaaaattagccgggcatggtggcacgtgcctgtaatcgtagctactcgggaggctgaggcaggagaatcacttaaacccgggaggcggaggttgcagtgagccgagatcgcaccattgcactctagcctgggcaacagagtgagactccatctcaaaaaaaagaaaaaagaaaagaaaaaaagaaaatgtctccagacgttgctctatttctggggcagtggtataaaatctccccgactccgttgaaaactactgttctaggcctagtaggttcaccttgacagcattctcaaatattcacagaagaaaaggggcaaaggacaccaagtggggaccccagcttactgattgatttgtgggcttggcagtcaggcagcctctgtttaaatcctgactctaccagctgggtgaccttggacaagttacttaacctctctgtgcctctgtcagttctggttttgttttctcacaatcgtgcctcctcttgatcttcagctgcagcccgagggtggaacttgctgtgtgtggctgggcactttcgcctgtggctgtgctgctctgcccacagggaacatgcctttgctgccccttccctgtcagcatcagggtcacaacctgcccgtccttccagggccagcttccatgcagcttcctccacgcacagccccttccccatcggcatggaaggctctcttccttgtgcccctggggcagccggaacctcaggtcacatgcagctcctcccgcgccgtggggatctggtggtttctgtctgagttcctccccacttggggtctgagaccgtgggagcctctagcgtgcccagctcgggctgtctcactgtttgttacccaggtgaggtggctgtcccctccctaccttgggttgagctgtgaaccagtaggttaccgcagtgtggtaccaccccccccaaccccaacacccagctcattctgagagggtggagtgggcggaaatccgtgcctggcagaccacaaagccacataactgacttttgtagccctgccctggggtgttgggggggagggttgacggcagccattgcccctttcttcggtgctttgccaccagcagacgccccgtggaattgaggagctttgttctacgagctcgggaacgggacttgggagggacagcccctgtcccaccctgccatgccctgttcaaccctgtcaggcagctgaacgtaggctggacccatggctgcccaccctggctgcagtacagaatcacctaggggacctcgttaaaatgcagcttccggaccccaccctggggcttggggattctgcctcatcagcctgggtggggcccaggaaacctgtgtgttaccagcgctgaggtgctgctgatgaggcagctggcttcacagctgcacgggaaccagtgccgtttaaagcactttcccccacagtgcggctccagcagtcaggttcacgtactctgggtgacctggggcaggctgcgcaacctctctgtgccccagtttctttgtctgaggataataacagtacctgcacgtgggtgcgcttgttgtgaggcttaaatgagattatccaggtgaaatgggaacagagtgcctggtacctagtgctcaacacatgtaacctgccttaacatctctgatattattattattattattattattattattattattattattgagacagagtctcgctttgtcacccaggctggattgcagtggcataatctcagctcactgcaacctccacctccccggttcaagcgattctcctgtctcagcctcttgagtagctgggattacaggcgcgcaccaccacgcccagctaatttttgtatttttagtagagatggggtttcaccacgttgaccaggctggtcttgaactcctgacctcaggtgatccgcccaccttggcctcccaaagtgctgggattacaggcgcgagccaccgcacccggccccatttccgatattaacaacagtcctgggctgtgcggtcacacacgtgtaactgtgcgatgtgccctcgtgcctgcaggcgtacctacgcaggcacactgagcattgtgtaccgggacccaggcctccctgctgaggacagagcatccctgtggtacatgcgtggacgcagtcactggctggacgtggtcagaagggcagacgtgtgtgtacacaaggcccagacaagcgggtttttatttgattcacactctgaccttattccttgagttagcagcacctgggctgagctctgggagcccaaggtgccccttgtttccatagcaaccataatctggtaaaaataggcgggggagggaagagctggaagaggcccgagccggctccgggggcatcctgcctgctaaggtccttttttccacattgctgaccatacagaggtgctgttttgttttgttttttttttttcttaggataatgacatgcaaacctctgagtactcatgactcagaattgacacttgttaacattttttctcattttcatcaaaccctcttatttatttatttatttttgagacggagtctcactctgtcgcccaggctgaagtgcagtggcgcgatcttggctcactgcaacctccgcctttcgggttcaagcgattctcctgcctcagcctcctgagtagctgggatcacaggcgcccgacaccacacctggctaatttttatattttttagtagagatggggtttcaccatgttggccaggctggtctcgaactcctgacctcaggtgatccacccacctcggcctcccaaagtgctgggattacatcaaagtctttttaaaaaactgtgttaaaatatacatattataaaacttaccatttaaagcatttttaagtgcaccattctgtgacattaagtacatttacaatgctgtgcaaggatcaccattatttctagaagtttttcatcatcccaaactgaaacttcgtatacattaaataataactccctattccctcatctccacagcaccctgcagccaccattctgctttctgtttctatgaatttgactgctcggtgaactgtgtataggtgaaatcacacagtacttgtccttctgtgtctggcttatttcacttcccataatgtcttcaaggttcatccatgttgtagcgtgtgtcagaatttcctttttttttttttttttttttttgagatggggtcttgctctgttgcccaggctggattgccgtggtatgatcttggctcactgcagcctccacttcccaggctcaagcgtttctcgtgcctcagcctcctatgtagctgggattacaggtgtgcaccaccacacaaggctaatttctgtatttttagtagagatagagatagggtttcgccatgatggccaggctggtcttgaactcctgacctcaggtgatccgcctgcctcggcctcctaaggtgctgggattacaggggtgagccaccatgcctggcctagaatttcctttccttttaagactgaataatatcccattgttgcatgtatcacattttgtttatccatgtgttcactgatggacatctgagttgcttccaatttttttttgctgttgcgaataatgccacagtgaacgtaggtgtataaatatctgggtctctgttttcagttcttttgggtatctatttaggagcagaattgctgatcgtatggcaattctatgtatagttttttttttttttgaggcagggttttactgtgttgcccaggctggagtgaagtggcatgatctcggctcactgcaacctccgcctccctggttcaagtgattctcctgcctcagcctcccaagtagctgggatcacaggcgcctgccaccacacacggctaaattttgtatttttagtagagacggggtttcaccatgttggctaggctggtcttgaactcctgacctcaggcaatccaactgcctcaacctcccaaagtgttaggattacaggcatgagccactgcgtctggcctctatgtttaattgtttttgttttgttttgtttttgagatggagtctggctttgttgcccaggctggaatgtagggcacaatctcagctcactgcaacctctgcttcccaggttcatgccattctcctgcctcagcctcccgagtagctgggactacaggtgcccacgaccacgcctggctaattttttgtatttttaacagagacggggtttcactgtgttagccaggatggtctcaatctcctgacctcgtgatctgccctcctcggcctcctaaagtgctgggattacaggcgtgagccactgcgcccggcctctatgtttaatttttttagctttttttaaaattaaagaaataaaacacacacataaagttaagttccggtcatcatttctgcttgcctccgttcctctatttcttccatccataggggctaccattagcaggaattttgtgttttctctcagcccactttatttatttatttatttatttatttatttatttatttatttatttatttttgagacggagtctctgttgcccaggctggagtgcagtggtgcgatcttggctcactgcaacctccgcctcccggttcaagtaattctcctgcctcagcctcccaagtagctgggattacaagtgcgtgccaccacgcccggctaatttttgtatttttttttagtagagatggggtttcaccatgttggccaggctggtcttgaactcctgacctcaagtgatccacctgccttggcctcccaaagttttgggattgcaggtgtgagccaccgtgcccggcctcagcccacatttttaatgctttcacattcatacacaggtatctagaaacatttatagtttttgtgtgcattaaaaagggacatacctgacatccttttgaatttgtgtgaggtggcgttctggcgctagattgcctgggttcagatcttggctctgacacgcagcagctgtgagacctcaggcaggttccttcatctctccatgcctcccttttctaatctttgaaactggactaatagcaaagcctgaaacctactgcaagggttgttttggagactgagtaagtttatacatgtctagtgcttagaacagagaggggatgtagcagacacaggatggatatattaccattatcgttctgcatgtgtgtctgtccacatggttgtaaagtctattttttttttttttgagacagagtctcactctgtcgcccaggctggaatgcagtggcgcgatcttggctcactgcaagctccgcctcccaggttcacgccattctcctgcctcagcctcccaagtacctgggactacaggcgcccgctaccacacccggctaattttttttgtatttttagtagagacggggtttcaccgtgttagccaggatggtctcgatctcctgacctcatcatctgcctgccttggcctcccaaagtgctgagattacagatgtgagccaccatgccttgctttttttttttttttctttttttggagactgagtcttgctctgctggagtgcagtggcaggatcttggctgactgcaacctctgcctcctgggtacaagtgattctcttgcatcagccttccaagcagctgggatcacaggagcatgccaccacacacttttttttttcttttttgacggagtcttgctctgtcacccaggctggagtgcagtggtgcaatctcggctcattgcagcctctgcctcccgggttccagcgactctcctgcctcagcctcctgggtagctgggattacaggtgcatgccaccatgcccagctaatttttgtgtttttggtagagacggggttttttggccaggctggtcttgaactcctgacctcagatgatccacctgcctcggcctcccaaagtgctgggattacaggcatgagcctcagcgcctggtgatagatctagtttcttctctctttctccttttttttttttttttgagacaggatctcactctgttgctcaaggtggtgtgatcctggctcactgtagcctcaatacccccagggctcaagtgattctccaacctcagcctcccacgtggttgggactacagcatgcaccaccatgcttggttaagtttttaagaaatttttgtagagatgaggtttcaccatcttgctgtctcaaacttctgggctcaaatgattctccaaccttggcctcccaaagtgttgggattacaggcgggagccaccacttctggcctagttttttctttttggtgccatgcatattaatttgtacaaatagatcacattttttttgtatcccccattgatcccctcttgctggacacctaggtcgtttccattttctgatattgcaagcaatgctgcaggcagtggctttccccttgcctggccctctgtgcgtttgtgtgaggtcatgaggggtacctagaggtggggctgttgggtcgcagctctactggatgctgccagattgccctcaagagaggacttaggctgggcgcggtggctcacgcctgtaatcacagcactttggcaggccaaggtgggcggatcacttgaggtcaggagctcgagaccagcctggccaacatggcaaaaccccgtctctactaaaaacacaaaaattagccaggtgtggtggcgggtgcctgtaatccagctactagggtggctgaggcaggagaatcacttgaagacgggaggcagaggctgcagtgagctgagatctcatcactgcactccagcctgggcagcaatgagagacaccgtctcaaaaaaaaaaaaaaaaagaggacttagtattttcactgctcccaattctatgattcccattccccacgtcctcactgatgtttgattttcatgttgatttgagtgacagaagcatattttattttattttattttgagacggagtctcactctgtatagtggcatgatctcggctcactaaaatctccgcctcccgggttcaagcaattctcctgcctcagcctcccaagtagctgggactacaggtgcccgccaccacggcccggataatggtttttttttttttttttgtatttttagtagagataggtttcattatgttggccaggctgctctcgaactgctgacctgttgatctgcctgcctcggcctcccaaagtgctgggattacaggcatgagccaccgcgtcctgcctattattttattctttattatacaaacatgaacagatctctgaataagcgcttggaaaccctcatggctccactgtcagatcgctgtgtctgagcctccctcgagtccctctccacaggcccagggatgcgcttctcttcaccctttttctgtgtcacaagcatttccatatattgctacattcttttttcccctctttaaaaatagcacttttcctgattataaaaatagtacatgctcactgtagaacatttagagaatatgtacaaatagagattaaaaaataaaaatatgacccatcacccaaaatgttatcattctgatgtatttctttacaccttttttttttttttttttttgagacggagtctcgctctgtcgcccaggctggagtgcagtggcacgcttacagttcactgcaacctccacctcctaggctcaagcgatcctcccaccttagcctccggagtagctgggaccacagcatctgccaccatgcctggctaatttttttttttttgtagagatgaagttttgccatgttgcccaggctggttttgaactcctggtctcaagcaatccatccgccttggcctcccaaagtgctgggattacaggtgtgagccaccttgccccgccaagtgtggtgttttaaatttaagtgaattaagtacaattaaaaatgcagctcctcggttgcactagccacatctcaagggctcagtagccacatgtggctggtggctaccatagggaacaacgcaggtacagaacattacagaacattttcatcatcccagaaagttctactgtacagcgctggttgagaatgaggtccagactcccctggaggacttccaagggctggacaagcccagagagtctatgctgtctatgatggattacgcactgcagaaacgtccctggacccccaggccagaaggcatctgaaccgcataaagccagtgccaccgggtggtgctgaggaggaggaggcggcaagctggtgtctggggcagtgaggatttcagatgcagctcctgcctccttgggcagacagaactgtcacctccagggttgcccaatcccatggtcagcacccagttcaagcataatatgtcgtgggtcctggtgtctcttgcattcacgcacacacacacacaggtatgtaccattgagacatgaccacgcagggtcacccaggttcacacatacagcctcattcatgctcagaaacagttccccaaaaggcacaaacacggtctttgccgattgccattataacagcaacaaaaatagctgttaggctgggcgccgtggttcacgcctgtaatcatagcactttgggaggctgaggccagaggatcacttgagcccaggagtttaacactagcctgggcaacatggtgaaacctcgttgccaaagaaaattaaaaaacaattagccaggtgttgtgtggtatgtgcctgtagtctcagctacttgggagtcaggtgggaggattgcttgagcccaggagtgggaagctgcagtgagctatgatcacaccaccgtactccgcctggaggacaataaaaccctgtttttttttgtttttttttttttttttttttttaagaaaaggtggctcacgcctataatcccagcactttttttttttcctttggggaaattttttttttaattatactttaagttttagcgtacatgtgcacaacgtgcaggtttgttacatatgtatacatgtgccatgttggtgtgctgcacccattaactcttcatttaacattaggtatatctcctaatgctatccctccccactccccccagtcccagcactttgagcggctgaggcagctgtgaggtcaggagttctagaccagcctgaccaacatggtgaaaccctgtctctactaaaaatacaaaaagtagccgggtgtggtggtgcgcatctgtaatttcagttactcagggagtgctgcttccttggggtgaggcacagccctgtggcgagtctcttggtaaagtgaaaaatgctgtaaatgggtggctgagatgggtgcagaggattggggtgtcatggggatggcgggtggcatggggctggcttccggatacctcatccctgacattttctctgttgacattggaacccaggatgtccagatgctgtttttgaagccctatcggccagggagtcaatgggcccccactttgcctgggagggctgtgtcctggtgtcctgtggggttttggtctcccaccccggggcctaagggcctcagaatgaactggaacccaacctttgtcaggggagccccagcaatgtctgcacgacatacgcccccaaacagcgtgggttcaggaatttgtaagtgtttgagaaagaaaaactgttaggattctagtttcgttgaaaagccattttgcctttgtcttcctctgggcacctgaccatccattcttagcccacctgagtattgagcatacactatcgtctctgcagtggaggtggtcctggacgcatggcgtaacgtgggctctctgggccctccagaaaagtgtgccactcgctcctctccggctgggccgtcagaacccacagctcacacacacatccagtcaaggtcagaagaggtggctgcattcctgactcaaggtcaaaagaggcaactacataatcagtgagtggccctgaggggccagtaagcaataaggcagcgggaaagggtgcagagcaattgtggagcaattactaagcaagcagaatgggaagcaacacgactgaacaagaaacagcacatggggccgggcacggcggctcacacctgtcatcccagcactttgggaggccgaggcgggcggatcacgaggtcaggagatcgagaccatcctggccaacatggtgaaaccccatctctactaaaaatataaaaaattagctgggcgtggtggcgggcgcctgtagtcccagctactcgggaggctgaggcaggagaatggcgtgaacccgggaggcagagcttgcagtgagctgagattgtgccactgcactccagcctgggtgacagagcaagactgtctcaaaaaaaaaaaaaaaagaaagaaagaaaaaaagaaacagcacatgggccaggtgtggtggctcacacctgtcatcccagcagtttgggaggccgaggcagatggatcacttgagattaggagttcgagaccagcctggccaacatggtgaaaccctgtctctactaaagtacaaaaattagctgggcatggtggcacacgcctgtaatctcagctacttgggaggttgaggcaggagaatcacttgaacccgggaggcggaggtttcagtgaaccgagattgtgccactgtactccagcctgggtgacagagctagactccatctcaaaaaaaaaaaaaagtccgggcatggtggctcacgcctgtaatcccagcattttgggaggccgaggcgggcagatcacctgaggtcaggagttcgagaccagcctcaacgtggagaaaccctgtctctactaaaaatacaaaaattagccgggcatggtggtgcatgcctgtaatcctagctactcgggaggctgaggcaggagaattgcttgaacctgggaggcggaggttgcagtgagccgagattgcgccattgcactccagcctgggtgacaaaagcgaaactctgtctcaaaaaaaaaaaaaaaaaaaaaaagaaatagcatatgggtcacaaattctgttgactaagtagaagcagaggcttggccagagaggaggaggaggcggcggctggagatgcctgtggtggttcgaaaggaagcacctggactgtttgagggaagcctctgtacaatgtccaattttaccccaaaacgtatcatgctgcctccctgcaccacttcctcttttaggagacaaggtgttgctctgtcccccaggctggagtgcagtggcataattgtggctcactgcagccttgaactcatggcacaagcaatcttcctgcgtagctgggatgacaggcatgtgccaccacacctggctaatttttaaaatgtttcttatagagatggggtcttgctatgctgtccaggctggtcttgaactcctggcctcaagtgatcctcccaccttggcctcctaaattgctggtattatgggtgtgagccaccacacctagtcccatcttccctttcaaacacaggcctagcagcagcatctctccagcctgtctccgcagggttgtttttggctcatgatttgggcaagaggagggagaagggaagagaagaaactttgctgttggaactgggtcagaattggaatacaggaagcaagaacatgagtgttcacgctttgactgagctgttgacagcaccgaggccagaggcaggagaaatgaagctgtttgtttatctgatgaatattcatcgagctcctatttgtagccagccgcctctgttttaggagccggggatccctttgttgaatcctggctctgccactcactgctggggttaccttgggcaaccgtctgaacctctctgagcttgttttcccatccggaaagtgaagataaggagcgtccctgtctcacagggatgtttgaggatgaaatgagctaacataggaaaagcacttagcatggtgcttggcgcagagttagtgctcgtgactgcagctgttactgaagacagagcgtttaggtgtgaagagggtctggtgcccgcatccaaggaactcacagtctctggaggaaacagacatttaacagtcatctgcaaagcatgaggcagtgccaatagagatattcttcctggtggaatgagggaaggcttcttgaaggaggcggcgctggaaggttgaaaaggaatccctaggaagagaaggttgcagggggcattttttttcttttttctttctttctttctgtttttttttttttttgagacggagtcttgctctgtcgccccggctggagtgcagtggtgccatctcggctcactgcaacttcctcctcccaggttcaagcgattctgctgcctcagcttcccgagtagctgggattacaggcacccaccaccacgcccagcaaatttttttttttttttttttttgtatttttagtagacacagggtttcaccgtgttagccaggatggtctcaatctcctaacctcgtgatctccccgcctcggcctccccaagtgctgggattacaggcgtgagccaccatgcctggcctgcagggggcatttcacactgaggaaacagtaagggcaaaggctgcgggtgggtggggaagtgtgtagagctgtttgagaagcggtgagccaggctctcgaaatggatggagggacatggcaggaaacagccagaggcgagggtggggatccgctcggggaggctctgagtgtgttgccggcgagatgacgggtgccctggaagagcgggatgggggaaccgcctgtctccttggtgacttgggaaggcggccttgggagctttggggatggattgcggaagggaggagatgcttgctgtgctcctgaggaggggtggggcctgaatgtcctcttggctggggttggaggggagggccaggctagggtcctaagaaggtgaatcctgagcccaggcatctagcccacgtgcagcatgaaaggaggatttccggccgggcgcggtggctcacgcctgtaatcccaacactttgggaggctgaggcgggcggatcacgaggtcaagagatcgagaccatcctggccaacatggcgaaaccccgtctctactaaaaatataaaaattagctgggcgtggtggcgtacgcctgtagtcccagctacttgggaggctgagacaagagaatcgcttgaacctgggaatgggaggttgcagtgagccgagatgacaccactgcacttcagcctggtgtcacagcgagactccgtttcgagagagagagaggagagaaagaaagaaagagagagagaaagaaagaaagagaaagtcccatggaaatgggggtttcacatttgggggatttgcaaagtagtcacgtgggtgaggcaggagggaagcctagtagcagagaagatgatgccttcggccttgagtgtggtgcgtttgaggagcttgtggatcgtcccaggggtgtgtgtggttgggctctttagctcaggagagctcagctgagtggatacccactcgcacatccaacagctctcattcccaaagcgtgttctgagtgtgagtcctacaaaagtggacaattcagaccctgttgggttttgtggcactttctagtcagggaggcagatgagaacagaatgaagaacgcagatggtttcagacagtgcccagtcctgcgaaggaaatagaacagtgaggcgatgagggtggggctcggggctgggggaaggggctaccctgggtgggtggtcaggaagagcctctccatagaagggacatttgaggcctggcgcggtggctcatgcctgtaatcccagcactttgggaggccaaggcgggtggatcacctgaggtcaggggttcaagaccagcctggataacatggtgaaaccccctctctactaaaaatacaaaaattagccgggcgtggtggtacctgcctgtaatccccaagctcttctcccagcccacccggcaccagccagtttgagctctgactgggaactgggatctcattcatcccatctggtcagcatctctttggttgctttttatcagcttcctattagaaaaaaaaaaaatccccttgaaaaacaagggggagggttcatacacgatcggttgcagcaggcacgccagtgacggtgggggcccagggggagcgtggcagaggctctcaggctggaggccagctactgctccggccagcccttccctgtgggggagccacaagaggccgtccctgggcctgcaagcatgagatgagccgagcacttgaccaaaactagtttgggtcttagaatttaacttatcctgggccgggtgcggtggctcacgcctgtcatcccaacactttgggaggccaaggctggcggatcacttgaggtcaggagttcgagaccagcctggctaacatggggaaaccctatctctactaaaaatacaaaaattagcagggtgtggtggtgcacgcctgtaatcccagctactcgggaggctgagtcaggagaatcgcttgaacctgggaggcggaggttgcagtgagccgagatcgcgccattgcactccaacctgggcgacagtgagactccatctcaaaaacaacaacaaacaaacaaaaataatactgcgatttcctagcaatgcccagtgacttaccctaaattcagtgaaagttgaaaaaaaaaaagaagtggcatttgaaggagacccgaaggaagaaaaggagccagtgtgaagctgtctggggaagagcattccaggtggtgggaacaggcttggcaggtgtgaagatgaggaaggaggcccctgaagagccggcgggaagagcgggtggatgggaacacagtttccccgtccgccagcaggtggcactgttggcccaggactgcccgggcatggctgggagagcaggtggggccgcgggttctttgacctcaggtttgtgattctggctgtgggctcatcacaggctctacctccaccctctggggagataagccctggccgggggcagaagagcagttgtaatggtttcctggctgttctccttccccaacgggtcttgctttcagtgtttctttgcttgctccctctccagaggtgacttccctcccggtttctgggtatctgtgtctttgctctctccttttgcttttctttttgctcccttggtctcttctcctccctctctcattgctccctgggggggcaggttcctgtctcaaagattaattacttgctttttttttttttttttttgggaaacctcgctctgtcgcccaggctggagtgcagtggcacgatctgggctcactgcaacctctgcctcccaggttcaagcgattctcctgcctcagccttctgagtagctgggattacaggcacccgccaccacgcccggctaattttttgtatttttagtagagacggggtttcgccatgttggccaggctagtctcaaactcctgacctcaggtgatccacccgcctcagccttaaaaagtactgggattacaggcctgagctaccatgcccggccaattacttgctttcctgatgtagctcagatggagcgggtggtgacttaggatcaggaaggtgctgtttctcatcccattgcctacccttccttcccgtggcttcagatctccataaagggctggggctggggtcgtgaccccgtcggtagaaaatggtcccagcgacccttctctcctggagcccatggacccacctcccagtgccatgccctgctcacctccagcccctctagcaggcagccctgtcttcatgtgagaagggagaactggatggcaaagcagatggcacagaacagctgcacaagagctcaccgaagggcttgttatgaaagagtcatttttgtcaacagaagtacgcttctgccctatactccgtgctctgtgaattatttctcaggggagactaagctggccagagcctggtggtggcctcctggctgtcggatgtcagagttagggctgcaggttgaggggtccttggctttggtctgtgagtaccatggtggttaagagcctggtctctctctcttaaattttttttttttttttttgagatgagattttgctatgttgcccaggctagtcttgaattcctggcttcaagagatccttctgcctcagtctctcgagaggctgggattacagttgtgagccaccgtacctggcagtctctttattttactttactttttcctctaaagttaaagtttacagtattttattttgttgtggtgagaacacataacatgaactctaccctcttaacagacttttaagtgtacaatacattattgttgaatgtaagtaagagtttactctcttaaagcctcccactgggtgggaagtctagcaccttacaacaggaccctgtaatcccagcactttgggaggccgaggtgggcggatcacttgaggtcaggagttcaagaccagcctggccaacatggtgaaaccctgtctgtactaaaaacacaaaaaaattagctgggtgtggtggtgcatgcctgtaattcgagctactcgggaggctgagggaggagaatagcttgaacccatgaggcggaggttgcagtgagccgaggagatcgtgccattgcactccagtctgggcgacagaggaaaactccgtctcaaaaaattaaaaaagatggccgggtgtggtggctcacgcctgtaatcccagcactttgggaggccgaggcgggcagatcacgatgtcaagagatcgagaccatcctggctaacatggtgaaaccccgtctctactaaaaatacaaaaattagctgggcgtggtggcgggcgcctgtagtcccagctactcaggaagctgaggcaggagaatcgcttgaacctgggaggcggaagttgcagtgagccgagatcacaccactgcactccagcctgggcgacagaatgagactctgtctcaaaacaaaacaaaacaaaacaaaaactaaaaaaaagattttgaacagtaaatgtatttacatggttggttctaaaaccaaaatgatataaaaatatatgtggtagaaagatttgcttgtactccaatccgccctgtccctacattctaaaattcactttgaggttctttccagtgcttctttattcacatgtaagatgagcatatccttttcttacctccactccccttccctcccttcccctcccctccccttccctcccttcccctacccttccctccacttccctcccctcccctcctctcccctccctttccttcccctccctcccctgcccttccttcctctccccttccctctttctttttctttctttctttttttgagatggagtcttgctctgttgccaggctggagtgcagtggtgtgatctcggctcactgcaacctctgcctcccgggttcaaggattctcctgccttagcctcccgagtagttgggactacaggcacctgccaccacgcccagctactttttgtatttttagtagagatgggatttcactacattggccaggctggtcttgaactcctgacctcaggtgatctgcctgctccagcctcccaaaatgctgggattacaggtgtgagccaccatgcccagcctcctatttctttttcttaaataaaaggtaatatcctacaaaacactgttttacatcttgcctttttctctggagaattcctgtctgaccactgagagctgctgctgcctctgccccattccttttaaaaataactgtgtagtatttaacggtgtggatttaattttagagactgatgattcctttcagaaatttaattttgtataacgtaagtaatataagaatacatttttggctgtgcatggtggctcatgcctgtaatcccaggaccgtaggaggccaacgtgtgtggattgcttgagcccaggagtttgagaccagcctggtgggggggcagcatgacaaaacctcatctctactaaaaataaaaaaaattagatgtggtggtgcacacctgtaatcccaggtactggggaggctgaggttggaggatcccttgagcccaggagtttgaggctgccatgagctgtgatcatgccattgcaatccaggctgggtgacagagtgagaccctgtctcaaaaaacaacaacaacaacacaaaaaacaggctgggcgtggtggctcacgcttttaatcccagcactttgggaggctgaggcgggcggatcacgaggttaggagttcgagaccagcctgcccaatatggcgaaaccctgtctctactaaaaatacaaaaattagatgggcttggtggtgggtgcctgtaatcccagctactcgggaggctgaggcaggagaatcacttgaacctgggaggtggagtttgcaatgagctgagatcacgccattgcattccagtctgggtgacagagtgagactctgtctccaaaaaaaaaaagaaaacaaaaaaacccaaatcattttccttaaaacaatcagaacattaaagataaagtctcggccgggcgcggtggctcatgcctgtaatcccagcactttgggaggccaaggtgggtggatcacgaggtcaggagatcgagatcatcctggctaaaacggtgaaaccccatctctactaaaaatacaaaaaattacccaggtgttgtggcgggcacctgtagtcccagctactcgggaggctgaggcaggagaatggcgtgaacccaggaggtggaggttgcagtgagccgagatcgcgccactgcactccagcctgggcgacagagcgagactccatctcaaaaaaaaaaaaaaaaaaaagataaagtctcctatggccagcagtgacattccctttctctcctccccagagtagccactgttcagagtttggtacatacttttctagatatttaaacagggctgggtgcagtggctggccaggtgcattgactcactcctgtaatcccagcactttgggaggccgaggcgggcgatggctcgaggtcaggaattcgagtccagcctggccaacatggtgaaaccccatctctactaaaaatacaaaaagtagctgggcgtggtggcacttgcgtgtagtcccagctactcggtggggggctgaggcaggagacttgctggaacttgggaggcagaggttgcaatgagcgagatcgcaccactgcactccagcccgggtcacagagcaagactgtctcaaaaaaacgaaaacaaaaacaaaccagtatttttacatgtaccttaagtaaccatcaatgtccatacatacacagttagctcattccttctaatcacagtttagggtccagcttacaaatataccacaccctgcttatctgtttctcctgtaaatggttgttcttgataattttttttttttttttagatggagtcttgctctgtctcccaggctggagtgcagtggtgcaatctcggttcactgcaacctctgcctcctgggttcaagcgattctcctgcctcagcctcccgggtagctgggattacaggcacacaccaccatgcctgatttttgtatttagtagagatgaggtttcaccatgttggccaggctggtcttgaactcctgacctcaggtgatccacccgcctcagcctcccaaagtgttgggattacaggggtgagccaccgcgcctggcctgttcttggtatgtttttactcttatgaaaagtgccgaggtcaggagatcgagaccatcttggctaacacggtgaaaccccgtttctactaaaaatacaaaaaatgagccgggtgtgttggcgggcgcctgtagtcccagctacttgggaggctgaggcaggagaatggcatgaacctgggaggcggagcttgcagtgagccgagatctcgccactgcactccaacctgggagacacagcgagactccgtctcaaaaaaaaaaaaaaaaaaaaaagaaaagtgccacagtggacatcctcatagttgactgtctacacatgaaagtgtttctctagacttgagtgaatcctagatgtgagattgctgggtgatagggtaggtgactttctatttcatcatactgcaaattgcctgccaatttctatgccactagtaggagtgtacatgttgcttgtctgttgggtgaagcatcctgtctccttgctgtggttgcattccctgatttccagccctctgagcagctctggctgtgtcctgcgtgctgtaccctccgcccagagaagcactgtcctccgtaagtcaggtggactctcggcctctgaagttcctgcacccgcctggtgtctttgcagcatggtcttttgctgagaataacctcgaccttctccttttcaaaagccctccagagggctttactgaccagagaggtggctagagagttggctgtgggattgaccacactgacttccccagacccatcttaagaggctggctttagattttcatcctatcccagttcttaagatgtaagttctgccctgagggcccctgggggaagccacagcttaaagctcaaatgcatttcccttgctgaaggagctgagccagccaattccccttgtgctagttcaggggttttgtctgccaatctcaaacccaggaacaagttctaagaactgggtcccttgagagacctagagtctggcagttgggtgggaagaggattgaccttggagacagtttctgtcacctacacccacctcctgagaaataacttcaagagaggaaggaccatcttggtcgaggtggtatctcacacctgtaatcccagcactttgggaagctggggtgggcagatggctcgagcccaggagtttaagaccagcttgggcaacgtggcaaaaccccatctctacaaaaaatacaaaaattagctgggcatggtggcaggtgcttgtagtctcagctactcaggaggctgaagtgggaggactgcttgagcccacgaggttgaggctgtagggagctgtgatctcatcactgtactccagcctgggtgacagagtgagaccctgtctcaaaaaaaagaaaggaccatctcatctggtcctctgcctcagttcctaccccatttactataccactgaatccttcaccatccacctgacctttatttaaattaaaataaattaaattaattaattattattattattttttgagatggagtctcgctctgttgcctaggctggagtgcagtggcgtgatctctcctcactgcacactccacctcccaggttcatgccattctcctgcctcagcctcccaagtagctgggactacaggcgcccgccaccacacctggctaatttttttttgtatttttagtagagacagggattcaccgtgttagccaggatggtctcgatctcctgaccttgtgatccacctgccttggcctcccaaagtgctgaaattacaggcatgagccactgcactctgccattaattaatttttctgagatggagtctcgctctgtcacccaggctggagtgcattggcacgatcttggctcactgcaaactccacctcacgggttcaagcgattctcctgcctcagcctcctgagtagctgggattacaggtgtgcgccaccacaccctgttaattttttgtatttttagtagagatggggtttcaccatgttggccaggatggtctcgaactcctgacctcaggtgatccgcctgcctcagcctcccacagtgctggaattacaggcgtgagccaccacaaacttgttgttaatggtcactcattgtccgtggttgtcacatctcttttgtctctttaaatacagaacagagctgggtgtggtgaactgtacttccagctattcaggaggctgaggtgggaggatcattggagcccaggagtttgaggctgcagtgagctatgatcgcaccactgcattccagcctgggtgcattccagagtgtgaccctgtctataaataaatatagaacagcagacctggcaaagttgtttagtagaacgtctcacattttggatttatctgaatgcttcctttttttattccccaacattttcctggaatagtccttgattttacggaagaaagatgaaatgagtagcttgtgtgctgacagtgaagaggaagggagacactcctgttttatctgctggggccagatttgtgccagccctgccttttccttgggtgtggttgagaggactgtgcgcagaccgcccccagccagccactggcggggtgtgttggtgcatctggcactggcggggtgtgttggtgcatctgggtgttaggaggtaggtccaggggcttctcctgggaagttgtccccatgtcgccttcggggggtgctccctgtgggagaatgagtggtgtggtcgtcccccttgcctgaagctgttattttgttccctcctgtgtttccttgccggttgggtagaggtctactatgttcactaactaggttactagtgacagaaaccttactcaaactggcttaagaaaaaaaaaaagaaaccaaaaggaaaaacaaagtccatgaaaacttttgtaattggtaagtttaaggaacctggctttggccgggtgcagtggctcacacctgtaatctcaggacttggggaggccaaggcaggcggatcacctgaggtcaggagttcaagatcatcctgaccaacatggtgagaccccatctctcttaaaaacacaaaaatcagctgggcatggtggcgggcaactgcaatcccagctcctcaaaaggctgaggtacgagaatcgcttggacctgggaggcggaggttgcagtgagctgagatcacgtcactgcactccagcctgggtgatacagcgagactcagtctcaaaaacaaaacaaaacaaaacaacaagcaaacaaaaaactggcttcaggtccagctagatccaggtgggtgagacagcatcatcggaccatctatttgtacctatctcttggctctaattcctgcatttatttcattcacaggcacctctccccacatgttataaggcagccactggcagctctagtgtgagctttgaaaatctcagtaggtatgattaagctgcttccttctatagcacctgtaaaaatttggtgttcactctgtttggactgacgaggtgtgtgcccattcctgaagcaatcgtagtggattggtgaatagagtacatgaattgaggccagtaacggtggctcacacctgtcatcccagcactttgggatgccaagacaggaggatcacttgaggccaggagttcaagaccagtgtgggcaacaaggtgagaccctgtcactacaaaaaattaaaaaattaactaagcatggtggtgcacacctgtagtcctagacacccaggaggctggggctggaggattgcttacacccaggaggttgaggctgcagtaagctatgattgcgccactgcactccagcctgggtgacagagcaagactctgtctctggaaaaaaaaaaaaaaaaagcatgaatttgaatttgaattggccaagcctgcatcgtgtacctaccccaaagctcaggctgggtaggttgagaaaggggcagccccgtataaaccacaaaaaccaacagtggtgtcagagtgctccccaggggagcatcaaggtactgtcagctagaggaaggggcctgggcacggagcaggcagaaaggcatattccgcttcgtctggtgatgggcatcgggagtctctggccgagtcagctcctcgtttcctggggctccattcctcttcattttggatttggcggaagtcagtgtccacaggaccatctgtgtcagggtgtcagccctgcttctttttttttttttttttgagatggagtctcactcagttgcccaggctggagtgcagtggcgtgaccttggctcactgcaagctctgcctcccgggttcacgccattcttctgcctcagcctcctgagtagctgggactacaggtgcctgccaccatgtccggctatttttttgtatttttagctgagacggggtttcgccgtgttagccaggatggtctcgatcccctgaccttgtgatctgtctgccttggcctcccaaagtgctgggattacaggggtgagccaccgcacccggtctcagccctgcttcttagtggctgtgtgatcctggacagaagagttagcctttctaggtttcggtttactcatctggaaaggagtatgatgttcatgttctttcttttttccttttttttttttttttttttgagacagagtctcgccttatcacccaggctggagtgcggtggtgcgatctcggctcactgcaacctccgcctcccaggttcaagcaattctcctgcctcagcctcctgagtaactgcgattacaggcgcccaccactgcatccagctaattttttgtatttttagtagaggtggggtttcaccatgttggtcaggctggtcttgaactcctgatcttgtgatccgcccgcctcggcctcccaaagtgctgggattacaggtgtgagccacggcgcccggccttgtgttccttcttgatggggctgacaggatccagtggagtggtaggtgtggaagtgcaggcagctggcgacatgctgaacccagggggtggtgtgtgctgccctgcaaggtgattcttctgctccagggtgagcagggcctgtccttggacttgctctttggagagttgggatggtgacctgtactgggatggtgacctgtactgggttgttgacccctcgggatgtgtggggtgattcttccacagatgaacatagcatggggcagaacactgtcccactgcgggaaccctttgctcattctccgagctccagatgaggaagggaggcgggtggaattggatgaattggcgcagtgattccgaaattgtaaccgggggagatgacatttggtggtaagaggacgggacacagcattccccgaaactgatccccggagagaaagctgtttattccctttgcagttctctttctgtgcagctcatcacttcaaggagaatgtctcagttaggggctaatatatgtctttaacacctttctaacatttgctaaccttccttattaacagagagagtgggtctcaagcctcaggccttgggcaggcgacagtgtttagcagactgtaataacattattcaattttcattatatttaccttttttctggtagacatttttttttaaggtttaaaaattatagaaaaggccaagtgtggtggctcaggcctgtaatcccagcacttttggaggccaaggcaggtggatcacttaaggtcagaagtttgagaccagcctggccaacatggtgaaaccctgtctctactaaaaatacaaaaattagcaggacatggtggcggacgcctgtaatcccagctgctcgggaggctgaggcaggagaatcacttgaacccaggaggcagaggttgagtgaaccagtgagccgaggtcacgccactgcactccagcctgggcaacacagtgagactctgtcttaataataaaaaaaaaaagaataaaaaataaataaaattacagaaaaattaagagtacagagagtccccataggctctataatccagttccctacaacttacattagtacgatccatttgctataattaacattagtgtggtccatttgctataattaacattaatatggtccatttgctataattaatgaacctagactgatgtatgatcattaataactgaaatgcatggtttattcagattttagagtttttccctaatgtccttttctgttccaggaaccacattacatttagttttcacagctccttagactcctcttggctgtgactgtttctcagactttgcttgtttttggcagccctgacagctttgaggcgtgcttgtcactcaatttagatttgtctcatatttttctcatgattagactgggtattggtttttgagaggatgactacccaggtatagaccaggtatagaaccatttttctttttttaattttttttgagacggagttttgctcttgttgcccaggctggagtgcaatgcgtgatctcggctcactgcaacctccgcctcctgggttcaagtgattctcctgcctcagcctccggagtagctgggattacaggcatgcgccaccacgcccagctatttttgtatttttagtagaaacggggtttcaccatgttggtcaggctggtctcaaactcccaacctcaggttcgcacccggcagaaccattttcgtcacatcctgataaccactgttgatgttggccttggtcacctggctgagatagtgttttgtcagatgtctccattgtaaagttattctttatttttaaatttttattgattgattgagatggagtctcactccatctcactccagtgtcactggagtgcggtggcgcgatctcggttcactgcgacccccacctcctggattcaagcgattctcctgcctcagcctcccgagtagctgggattacaggcgcccaccacaacacccagctaatttttgtatttttagtagaggtgggtttcaccacattggccaggctggtctcaaactcctgacctcaggtgatccgcccaccttggcctcccaaagtgttgggattacaggcgtgagccacagtgcccggctgttattctttattttcttccatccgtagtatactgttcacatctaaggagcagggcattatattttctttcttttcttttttcgctatgtttcccaggctgggctcaaactcctgggctcaacttgatctcctgccttagcctcctgagtagctgggactacaggcatgagccatcatgcctggcttatatttactttaccttctatttatgagaaatgattatatccatttatgatgtgaacataaagtcttggctgggcaccgtggctcacgcctgtaatcccagcactttgggaggctgaagtgagtggattgcttgaggccaggagttcgagaccagcctggccaatatggtgacaccctgtctctacaaaaaatacaaaaattagctgggtgtggtggcctgggcctgtagtcccagttactcaggaggctgaggtaggaggattgcttgagcccgggaggtggaggctgcagtgagccgagattgcgccactgcactccagcctgggtgacagggtgagaccctgtttaaaaaataaaaagaccggtgtggtggctcacgcctgtaattccagctgcttgggaagctgaggcaggagaatcgctcgaacctgggaggcagaggttgcagtgagccgagattgcgccactgcactccagcctgggcaagaagagctaaagtctgtctcaaaaacaaacaaacaaacaataaaaaacatgaagtctttataatattaatttataaaacatgaagtcttttcagtatttaatttaaaaattaagtccatttaaagaaaaatattaagtagagagaaaagttacaagagatatggggaattttttttttttttttttgagacggagtcttgctctgtcgcccaggctggagtgcagtggcacgaactcggctcactgcaacctccacctcccaggttcacgccattctcctgcctcagcctcctgagtagctgggactacaggcgcccgccaccacacgcggctaatttttttttgtatttttagtagagatggggtttcaccttgttagccaggatggtctcaatctcctgaccttgtgatctgcctgcctcggcctcggaaagtgctgggattacaggcgtgagccaccgtgcccggccgatttggggacattttaaaaagcaggaaagccaccctggaatggtagatgtcagagaaatgctgaaggcaggaagatgttgagagtatggtctgggaaaatggctggggctcagtgtcatctcctggcctgtttcccaaatccccttaagacaaggaacaggaagtgactgatgtagcctctgagaagtctcagacacagcgcagaggggccatggctaccccagggacgggtgtgatgactccctggggtcacggcttttcctccctcccttctctcgggctcctcctgaccccacagcattcccagcagtttctggcaggcaggtgaggagacctgggtcaggcaggctgtggcagctgcctgtgcaactggccctgtggcgtgcaagcctcaaccctctctacagctcagggtctgaaaggcggtgccaggtactgggtccttccgcccatgttatctagtttcctccacaacctgggggagtattggggtccttgtcattctcatcactcaggggaagagacctgtccaggtcaccagctggtcagggcccacgcttgggtaataggtgaatatttgacctcacacctttggatgtgaaacaagttacactcctttatttttctaaaaagtcttttaaaaatatgggctagccaggtgtgtggtggctcatgcactttgggagggcgaggcaggcaggtcacctgaggtcaggagttcgagaccagcctggccaacatggtgaaaccctgtctctaacaaaaatacaaaaattagccaggcgtggtggcacatgcctgtaatcccagctacttgggaggctgaggcaggagaattgcttgaatccgggaggcagaggttgcagtgagccgagatcgcgctactgcactccagcctgggtgacagagcgagattccgtctcaaaaaaaaaaaaaaaaaaaaaaataccacttttactaccctctaggaatggcatgaaatacagtagttttggagccctcccctccctagagttgcctaaaagccgtgggtgccctaagagagacctttgagtcgagccactgctttgacacctttccttggcaggctggtggtgtgaggctctgggtgtgagcatcctttagacgcccatctgagtttatgcctccagtgtcagggccgaaggtgggtctccatcctgagacctcgctgtcccaccctctcctcccctccagccaatccaattctgtcaagtcaaaagcctgggaaagtttttctggggcagaggaagctgaggctccagaacatggaatcctccttcttttctctctcttcctcccttccgtctttccccttcttttctttccatggtatttattgagggctagcgtagagcagacgccatcctgagtgtggggtagggcgatgactaaggtgtacacggtgtctgcctccgtggagtatacattccaccgggggctggtgtggggcaaatagacaagaaaacaagcacacagacaaatcagcaacaacaaaaaacccaaaacctcaacctggaataatacatgaagaaaacaagccagcggctaggtgcagaatcactaagggtgtgtcctgcaggtgagtggtcaaggaagccctctctgggaggcaacatgcttttgggataggtctatggtggagaaacaactcagttaatttccctttttttttttttttaatggtgtctcgctctgtcgcccaggctggagtgcagtggcgcgatctcggctcacggcaacctccacctcctgggttcaagctattttcctgcctcagcctcttgagtagctgggattacaggtgcatgccaccatgactgactacttttttgtatttttagtagagacggggtttcaccatgttagccaggctggtctcgaactcctgacctcaagtgatccacccacctcagcctcccaaagtgctgggattacaggtgtgagccaccgtgcccggcccaatttccccatttggtggttcagttacattgcatcattaataaagtctcctgcctcccactaccttgcagggtggggcggggtggggctgagatggtttccgtccaggttctccaagaaagacaagagcttcgccttcccagagtcatgctgagtgtacttcttattgctgacatggggccacgtgaaggtcactactggccttgcctgggcaacatctttccccctgtgattgggaggacgtgattggcacacttaagtcctttagttatcagctgtgatccatcatttgtgacccacagagcccctgattctgccttgtgggtacagtgagcgaggggttgggggcgggggtggaggaaatggacagaagcaaagagtttggagcgttgggtaaaaggaagatggccggcgcgcttttttttatttttatttttatttatttattttttgagacggagtcttgctgtgtcgcccaggctggagtgcagtggctcgatctcggctcactgcaagctctgcctcctgggttcacgccattctcctgcctcagcctccggagtagctgggactacaggcgcccgccaccatgcctggctaatattttgtatttttagtagagatggtgtttcgccattttaaccaggatggtcttgatcccctgacctcgtgatctgcccgcctcggcctcccaaagtgctgggattacaggcatgagccactgcgcccggccggccagcgcggtttctgaagctgctttgggacttggagggttcagagagtgggaactgaatttttttcccctaagagtagagagggagttgcttacacgaaagagctttgattacaacaggagtgatggaggctagacagctggaaggattttccttatggaaagggggtggaaaagccccagaaagcaggcctggtggaaagcttgcacattgcagacctgcagttgctcagcaggaggtttggagctcagctcccggctgggtgaagctctgggagtctgtgtcaacacctagggaagatgagctttgtgtttaccttttaggctaaaaggacttaatgtcggggtgggaaggatcattaacacatcagtgactcagagtccagaaggaaactgttgtccttccttctgtcacgaaggaaactgtcgttggctaagccaagccggaaagtctttgattacacccacaaagaggggcattttcccctggacccaacccagagttctcttcagggactgatagaggagaaagagatgaattcagacaacagggaaataaattagaatttattaggagtcgggtaaaagggtccccaacctataagttttctagttagtcaggcgtgtgagctggcaaccaacccctgccagtttctgcagtccacggggtggtccccaggaggttgaatgaaagaatcagtgtccccgcctcatctggtcccggcctgcacactgtgcctagtaccctcatccctgcacatgtatggcactgactacataagttctagcccagaggcacccagcagtgcctcagtctttttttgttgttgttttttgttttgagacggagtctcactctgttgctcacgctggagtgcagttgcatgatctcagctgactgcaacctctgcctcccgggttcaagtgattctcctgcctcagtctccagagtagctgggattacaggcgcccaccaccacgcccagctaatttttgtatttttactagagacggggtttcaccatattggccagactggtcttgaactcctgacctcaagtgatccacctgccttggcctcccaaagtgctgggattacaggcatgtaaatgcacaaatcttcattatacattttggacaaatggatccttcttccatcctgatatagaacatttctgtctgtccagaaaaatctcccacatccagaggcagccattgttctaatgtttttgtatcttagattgttttaaaacttcttatcagctgggtgtggtggctcacgcctgtaatcccagcactttgagaggctgaggcgggcggatcatgaggtcaggagttcgagaccagcctgaccaacatggtgaaaccccatttctactcaaaatacaaaaattagttgggcgtggtggtaggcgcctgtaatcccagctactctggaggctgaggcaggagaatcgcttgaaccctgtaggcgaaggttttggtgagccgaggtcgcaccactacactctaacctgggtgacagagtgaggctctgtcttaaaataaataaataaaataaaataaaataaaatttcttatcagccgggtgtggtggctcacgcctgtaattccagcactttcggaggccaaggcgggtgaattccgaggtgaggaattcgagaccagctggaccaacatggtgaaaccgagtctctactaaaaatacaaaaaattagtcgagcgtggtattgggagcctgtaatcccagctacttgggaggctgagactggagaattgcttgaacccgggaggtggaggttgtagtgagccgagattgcaccactgcactccaccctgggcaacagtgcgagactctgtctcaattgaaaaaaaaaaaaaaagttctcatcaatggaatcccgttgaagcattttaagcattttttggtgtctggcttctttcacttagatcttgcttttgaggtgcttccttgttgttgcatgtgtccatgttttgttcccctttattattgggtcgtattccaccgcggggatgtaccacagcttgttgatggacacttgggctgctttccgactttggcggtttgttttgttttgttttgtttttgagatggaatctcactctgtcactcaggctggactgcagtggtgcaatctcggctcactgcaacctccgcctcccaggttcaagtgattctcctgccttagcctcccgagtagctgggattacaggcatgagccaccatgcctggccaactttggctattttgaataaaatggtgatgaacattgtcatgcaagtctttgtgtagagcatgcatgttcactgaatccttgcagtagctaataggttggcactgttgttattcccattttacagatgaagacactgaggcacagagggggtgaattcctagtccaaggccgcatgcatagtaaaagctgggggtaggattctaacccaggttcgtctgactgcagcatatgtatttttattccctcactgtagtgtctttgcaccacagctgtttggggccattaagcctagggacaagtgggcatctcctctcaatggcctgtcaattcctaactgcattttagctcacaatagtagttgataataatggtagtgttgataataatggatttgagtcaccacaaaaagattccatcaaacctgcctttatttttatctgtttatttttgagacggagtcttgctctgtcgcccaggttggagtgcagtggcgcgatctcggctcactgcaacctccacctccctggttcacgcgattctcctgcctcagcctcccgagtagctgggattacaggcgcccgccacgttgcctggctaatttttgtattttgagtagagacggggtttcaccatgttggccagactggtctcgaactcctgacctcgtgatccacccgcctcagcctcccaaagtgctgggattgcaggtgtgagccaccgcgcccggcatcaaacctgtctttaaaggacaacagcatttggaggcgtttgagagaaatctctagctagggtcattacagtaactaacagcaagcaaggaagcaaacaaaaagtcttgctacccaaagccctagtcgcctggaaatctcacatagttgtaattcgtcatctcccagagaagccaggcacagaaggcgttactggatatataaaatagtatataaataatacatgtataagaaaccactctgttctctgtagagccaaacagaatagggttttggagagtctgctggttctcgctttgaaagatgttgctaagcaatgttgctaatattatggaaagacagcttccctcccggcttttccactcagcctcagaaactctggaagaggtggaagtggcttcaggagtagcagcagctggggaggtttggtaatcagtgaggcgggggccgggggaccttgggttggagagggactgtgctgtaggccacccagccctcagcctcatccgctcctgattctctgtactgactcctgggcggcctctatgcaaaataacacctcttcctgttcgtcagaaatttcacacacagaaggatccttttgaattttttcactgtgggaaaaattactgtagtcatgcagcttagcaaaaattcaaaaatccataaatgaacttcaaaaaaggaagtattttaaataacttcagtaacccaagtgatatatgaagaacttctttattcctccctctacccactctccataatccctgaacaggaagtcggcagggttctgattgacatcacgtactgcaggccccaccttcatggctctgggtaccagagcgcagggtgcccgccactgagtgggatctgtgggtttcctcagcgtggtttcctttccttggagcttggaaatgccacacaagtcacagagatccgtttccaaaacctgagccagtttagatcctctgcttaatatgacgtctgtggccccaggaaagttgggctgagctgaggtttcccaggcttgtctttgaggcctccgagtcctggcctgcgtttatcacggaacgaccctattgtggtgggatggacctcttgggggctggtcatgggttctgtgaggggattttagaagctgggaggagagtcagtatgttggcagagagttttcctgcatctctctcttttccttctttttttttttttaattagttatttatttatgagatagagtcttgctctgttccccaggctggagtgcagtggcacgatctcagctcactacaacctccgcctctgggctccagcaattctccttcctcagcctcccgagtaactggtattccaagcgcccgccaccacgcctggatgattttcgtatttttagtagagacggggtttcaccatgttggccaggctggtctcgaactcctggcctcaagtgattcgcctgccacggccttccaaagtgttgggattacaggcgtgagccaccgcacccggcccagctctcacttttcaaaaatagaaactgcttcccgacctcagatgacttcaatctttcccttcccccgacgccttcctgcctccctcttccccctcctctgtcttcctcctaagggggcatcccagagacgcaactgtgctgtggcccagcagggggcgctgatgtacctgccaagagtggaggtgtcttagcacaggtgtgagcgttcagctgtgtgcgagcgggcttcagagtgatatcccagagcaggtgtgtgtatgtgtgtaccctcaaaggcagaagagagcgggggtgctggaccgtcctgtccaaggctctgtttataacccttgcgttgtcccaaaggttgtgtggtccatggaatagctgggaccctgcccgtggaggggaggggcaaggcgtttgaagacatctggttttcatcaaaggccccaccctccttgctccatggcccccctcgcccccacccacccccaatcccagcccagaacggtggcagtcattctgcccagcagtggggcgctgggagttggtggctgggtggggcgacgaggtggcgtctgctgcaggctggctctctgacgaggggcacggggattggggctgattcccgctttctcatggatatgtctcctggagccggttcccaggcacagaaggcccttttcttcagggccaggcatgcgtgtctgtctgcctcaacccactggcccctcaggaacgggctgtgcagctgtctgcgctctgttcatgattaacttcgctgtctcccgccccaggcctgattcccacccaggccccctcagcctttggagttcccctggactggaagagagacctgggctggcagctgccgggcactttgttctctgggactgtgagctttggaggctggaacaggccatggaggtcctgagagctgggacgccgtggggcataagttgggtgaggtgagacctgcaggaagaccccttctctgccgtcagagacttctgccgtcctcatttcctgcggtctgcatgtatccagctttctcagcccaccccaaagtgcctcatgaatgtggccttggagcagagtaatgtgaaaattcttccctgtccgttctctttcgaactgtgatttcttcaagaacagtgccttggtttggcgcaggtgtgtcactaacacctaacactgcctgctttttttttttttttttttgagatggagtctcgctctgttgcccaggctggagtgcagtggtgtgatctcggttcactgcaacctctgcctcccgggttcatgccattcccctgcctcagcctcccgagtagctgggattacaggcacccgccaccacgcccggctaattttttgtatttttagtagagacggggtttcaccatgttagccaggatggtctcgatctcctgacctcatgatccgcccgcctcggcctcccaaagtgctgggattacaggcgtgagccactgcgcctggcccgcctgcttttttaaggaaggtacttcaagcttagagcctttgtcaggcaacagtattgaggcagaacttaataaatttatgtttgttttcatggtaggaagggcaagtgataatggattttcatttagggttgcaataacgttttcttttaaaattaagtaaaggcagccgggcgctgtggctcatgcctgtaatcccagcactttgggaggccaagatgggcggatcacgaggtcaggagatcgagaccatcctggctaacacggtgaaaccccgtctctactaaaaatacaaaaaaaactagccgggcatggtggcgggcgcctgtaatcccagctactcgggaggctgaggcaggggaatggcatgaacccggttggcggaagttgcagtgagccaagatcttgccactgcactccagcctgagggatggagcaagactccacctcaaaaaaaaaaaaaaaaaaaaattaagtaaaggccaggcgcgatggctcacacctgtaatcccagaacttgggaggccaaggcaggcggatcacctgaggtcaggagttcgagatcagcctggccaacatggcgaaaccccgtctctactaaaaatacaaaattagcccgatgtggtggcgaatgccggtagtcccagctactcaggaggctgagccaggagaatcgcttgaacccaggaggtggaggttgcagtgagccaagaccgtgccattgcactccagcctgggcgacgagcaaaacaacgtctcaagaaaaaaaaaaaaaaaagtgaaaaagtaagttgatgtaattaaagcaaaattataaacagcagagcagcatgacactaagacaaagaattatgaaggaggtggcgtgtggcccaattgtgggaagctttggctgggctaactgcacacactggctggaaatggtcttcttttgaggtttggagtgtgttaaccctgtttgtttcgggcagggatggtcttccatttttctttcttgccctggtctcttgcataaagctggacatactgtacatgtttaataaatgctggtggaatgggtaagcctagcattgatggttgttccagtctctgctattgatgggttttcttgtgctttggggtcccctctgtggggtgtgggtgtgatgggctgtgggggctggagtgggagttaagaggggaaattgctgtttatgcaccaaaggtggcgagcttgtagggcaggggcagaaggatgggacctctcactgccaggaaaattctacctcttagagactcaggagtcaggggctgagaggttacgattttttgggggacagccttgtgtttgcagtgacactgggcttgtagaaggacttagagggctgggaaccccagaataagagaatgaataatggaacctgcatggtggattttgtgccttcatcatcccaattccctgttgtagttgtttggagaggtggggtctcactatgttgcccaggctggtctagaactcctggtctcaactcaagtgatccacctgcctgcctcggccttccaaagtgctgggattacaggtgtgagccaccctgttacccactgtgcacttgacctgaactagctcccacactctcacctgctgggaaggaggatcaggccttccgttgaggtgcagccttctgtgtgtgggtaaaatacacccaacgctaggatagacctaagccagcgccctcatcaccttccctgccatctaactgaagcggtccatcagctaacctgtgggtcctcgggtgctgtgtgctatagcgcggtgggagagaggggaagagaagctctgggttgcatgctgctgggagctcttcccttttctctaccaaggacactcattttattctttttccagaccaattcttaagtcactactggcatagtacttgcagcctgcctaaccgccaatctcaggagtggggcccgggtcattcaaatctctagctataaaaagatgtccatggctatctatatctctgatcccccacaaccccggcagggagggggtgggggtgggggtggggggcacaaggccagtggtaacggctgcttcataaatagaccaggtgcatttaagaaccaccctggggcttcctcccctccaccccaactccagtgccagcaggaagctgtgggcattggagaggcagggctgaagcctcaggccctcgaattcgtttgcagtccctctcccctctccacccagcatggtcccctccctgcctggattttctgtgtttgcttgaacaccagactattaaaaacaaaacaaaaaacaaaacaacaacaaaaaacaaggcaaattgcctcagggggaacctcttcggccccaaagatggactaattggcttgttctaattcctttcagccccctgcccacttccttttccctagaggggcaaagctgtgagtgatgcttcggaggggtgaggcgggagggggctgggaggctgggcagcacctggaagtggatgagggcgattgtgagcgaggccccgcgccgatggtagggaccaggccacagccctttccccaggagccggcgcgaccttccgaccttccgaccttccgcccttcctttccgaaggagatgaggctcgcgcgcggctggcaggggcgggagggaccacgcgacgagtgcgcagcggccaggcccgggtgggcgcggggagggcggagtggggggcgcccggcccgccaggaggaagcggggtcgccgtgaagttggttattgaacccatgtggagtcaaactcccagggccgggagagccagtgttcgcggggagccgaccccagcccactctgcatcccagctcggcgatccttgcgccgactctgcggggaggcgggggcagaattccgcctcgttcctcccatccgcaagctcccacccggggacccgggcccgggagctgcgagccggggcgggcgccgggctcaggtgccccctgtaagcgctgggcggccgggaggggacggggaccgcgcgcgggcagtttcgtttggacggaggaggacgcgcgtttcctcttggtgcctgttttctctccctctgttttaaaagcagtgacagcatcggggaagtatccggggccgggccggggagggcggcagccgcctctgcctggggagggagctcggggccgccggcgggagtgcgggcggggaccagaaggagcgggcgaggggaggcagggccggggccggggagggcgcctgggagccgggcaggggggtcccgggagcgctgtccgcctcctcctgcgcttcgcccgctccctgtgccccgcgtcctccaccatccgggcggccgaggccggggcgcgggaggcggggccggggcgggtcccggcgcgggcggcgcgtctgagcgggagccgggagccgccggcccgggccgcgccccgagcgagcctcggaaatgcccgcgccgggggagcggacggcggctgccccgcgggccccgaggagacgctgaaggtcgccgggagggaggggagagcgcgcggtcacctgacccccggggcgcacctaggcggggcggggcccatgcgaggcggaggccgggggccggggcgcgggctcaggggccgggtgcggagcgcgcggagccggggctgcggggacgcgggcgggcgaggtcgggcaccgcgggcggcctcgccatgtcccagcccgcggggaggaggcattgccgaaaggcggggatccgcgccgccgtggtgctcatcggactcctgcacaaatcccggaggcagaataaagagaaaaggtaaacccctgcagcgccggccgcttccctccgctctcctgctgcatgccagttttctttggggtggacttttccgatgggtgtttggttccgtgttggttagaaaaaagcctcctctccaggtaccgtcgtgcgaaccgagttcggagcttcgccccggaccctggctggtgcgaggagcctgggcaggaccttggcggaatcggagggccgctgggagggcgcatcggggtggatccctgacggagggaccccaagtccgtcgcccccagaccctttgcagaccgcgaccccgttccccaagcctgcagccgcggatgccattgatccagcccaggcggctccatgcgccggtgttgccatttgcttcctgcaacttggctgagccctcgaggtgcctgcctggccgagatccgcttgctctgcgctcggtgccggcaggcgaggagcaagtttggaggttgttcgctccccacccaccctctcgccccaccgccatagggtgactttgcctcttcgcctttctggcgtttgttctttcgtttgctcctggatattgaaaatagttttctttagctatttcagagacattttggacgacctgtgtggtgggaggtgtggggtttggagtaggcaaaggaggttctgaggaagctttctaggctgcaaccgcagctgcaggtctgacatccaccagaccccaaggagctaccaggcaggtcgttggcacaaagcctccctgttctgctagggtgcatggcagagcctccagcaatggggggaggggagtgcggaagctgactgcccacagagatgttgccgggatcaggatttggggtagcttccagtgaccctgctggatcctagtttccagaggagttttggaatggttaataccgcaccctataagacacgggcagtggaaccagagacacctgggggtgaccagcagcccctggatatgcccacaggtatgaacgtacctggggtggtggtaggcagggaatacgggggactttgagaagctggcatggattgcccttgtggtgggttgtcccccattcctctcgtccccccttcctataatgtgtgtaacaagatgttgcccgctgcacagaatgaatttcccgtgaaaatgacataaggtggttcagcatgaaataacattgagtcacctagtgagaaagttcttcccttttcagttctctgcgaatccttgtgatttctttgaggggaagtttcaggtggatgctagtctgcctttaacacattttaaacacttgctaatcttccttttgtaattaagagagagcagacctccggctcccggtcctctgagtggggaacagttgcctggctagaacttaggttgtttttgtttttgtttcatttatttttaggattctctcctggttaatggccagtggtactgatgtttttccatttgtggtagtgatataaaacatctctttaaacatatgaagtcacaagaattaatctattttatttatttatttatttatttttgaggaggagtctcactctgttagcccaagctggagtacagtggcgccatctcggcccactgcaacctccacctcctgggctcaaacaattctcgggcctcagcctccggagtagctgggactacaagtacccaccaccacgcccagctaattttttgtattttagtagagacgggggtttcaccatgttgcccagggtggtctcaaactcctgagctcaggcgatccacctgcctcggcctctcaaagtgctgggattacaggcatgagccaccgtgcccggctgaagtgaatctatttaatagaaatagtagtaataataatacaagtgttaacaaatatagtggaaatcctgcaagtggtctaggaatggctgatgccagcgacatgtgtgtctagcagaagaagctgccatgggaactctggagtgcaatgttccagggcctgagtccatcttcccctggacttggattcccttctgttttctgcccttcagcattttatctgtagagtggtggtgaacaggtcaactctgagacagcctgggcctgctttgagggctggaatggaaaatgggcttgatagaaaggcagatgcgtgggaccaattcctgattctgagtatagaatgggtggtggttggggggtggagaggaaaagccccctgcacagagagcgagaagttctcttcctggctcatctgttgactgtggtgtgatggtagatttcatctctgggaacctcggtttctgcctcaccacaaagggctgtgaggctcaagtcagatcatgtgagtggagacaggacagaaaggtacaaagtgctgcataaaggtaacgggggtttgatcggaactgttccccctcttctctccctgagcctgtgctcctggtgaccaaggtcagatgtccggtggtgacagccccaccagtagcagtcaagaccagccatgcatgggccaagggggcagccaggtgggtttgagcctgggcagaactagtctgtgggtggtgggggcaggtgcagtgaggcccagggaaggacccggatagggacagggagggattggctgggacccgggtaccccaggcccatggagtcctttatttcttcctgagtgcactgtgctcttaagagcctgcaatgcaggcagacattggtggccttcctagcccctggcttcatcccgttcttctgtcgctccaaccatcctggtggctttggccatggacttaacctacccaaggagaaagagtgattgatttcatcatggtgctaagtgacctttgcttccctctctgtatctggagtttctttgtctctttaagcgtctgaaatgagtgcagcaagcactattgacccttgctctgcaggtgctggtggccacgggaggcctggagcaggctgcagctgccagcctctcttaagcatcccccatactccatgctgggcgttacatttgatgagctcttccttccaccacctctcatcacaaggtggggtcaggctcaggccccttcttctcctcccagaaggcttgatccatccatcgatcttcccagcacctgtaattgacaggcttgtgcagataacactgttggctcttagccttaagggttgaaatggttgtgtgtggcttgcagggaccacccagtggtctttttcatcctcctgctctctccaggccacttggaaatattgcgtattaggggacagggaggtgtgccagccagggtagtcatgagacagatgtcccatatagtcccagaactaggagactcccagctagtcttggtagttcccaagaactgtgctccaggctccaacttcaatttccgttttcgagaaatgggcgtggtgatcatcatgttggacttgaccgtgctctacgggagctgtggggcagcctggaggttatgcctttttctgcccatctttcagggtttctggcacatgggatcctgtaaaagcagtggcgtgtctgagaggggattgggtttgagtatggctcccaggagacacctggatgaagccttcctcagagactgcggtttggaaaccactttgattttcagagcctgcttcttatggatgtgggtagtggggagcttggctccctgagggggaaaacaggcagctttgctgggaaggacggaggccgaggaacacgatcaaaatatgtacgttcttggccgggcgcggcagctcacgcctgtaatcccagcactttgggaggccgaggtgggtggaccacctgaggtcaggagttgaaaaccaccctggccaacatggcaaaaacccatctctactaaaaatgcaaaaagtagctgggtgtggtggcgtgcacctgtaatcccagctattcaggaggctgaggcaggacaactgcttgaacccgggaggctgaggttgcagtgagctgagattgtgccactgcactctagcctgggcaacacagcgagactctgtctcaaaaaaaaggtacgttctgaaagatgtggataaagtcactgtggccttgggtgtgactttctgaactggagagaggtcatttagcataaatgaaaacaagtccacttcttatggtgggtagttattttgagacagctcccatcatggagtttatgaggaggaagatatggattctctcatcatttagcaaattctggcaggctgtcaggggagagctcgaatctgatgaatgtgatccctttgttgtggagtatcatacctggtgggttattcctgggtagaaaaagcctatcgcaattcttgtttaaaaaaattttgttgtgaaaattctcaagcatacacaaaagtagagagaatagggtaacataatacctactttcagccattatcaacttacggccccaatcttgtttcatttatgtaccaatgcactcctccacaagattatttttttgaagtaaatctcaggtactagatcatttcattcttaaatatttcaatttgtatcttaaagataagaattcttggccaggcacggtggctcacgcctgtaatctcagcacgttgggaggccaaggtgggaggatcaccactggagcccaggagttcgagaccagcctgggcaatatagtgagactcatctctacaaaaaaaataaaaaaacatagctgagcatggtggcatgtgcctttggtcccagctactcgggaggctgaggcatgagagttgcttgaacccagaggcagaggttgcagagagctgagatagagccattgcactccagcctgggcaacaggaaaaaaaaagttaagaattcttaaaaaaacccccgtaacactaccgttattataccctctaaattaacagtgatttcttaataccatatttagtcagtatttgaatttccccagttgtctcgtaaaagttttcaaaagtttttttgagtcagaattcaaacaatactatgtgatgggtgatgtgtctcttaatctgtattttcctccaactcttttttttttttttttttttgagacagagtcttgctctgtcacccaggctggagtgcagtggcacgatctcggctcactgcaacctctgcctcctggtttcaagccattctcgggcctcaacctctcaagtagctgggattacaggcgcctgtcactacggccggctaatttttgtatttttagtagagatggggttttaccatgttggccaggctggtctcgaactcctggccttaagtgatccacctaccttggcctcccaaagtgctggaattataggatacatgagccaccctgcttggccctttcaactcttttaaaaaaattttaatttaatttttttggagatgtggtctcactctgccacccagggtggagtgcagtggtatgatcttggcttactgcaacttccgcctcctgggctcgagtgattctcccacctcagcctcccaagtagctgggactacaggtgtccgtcacaacacccagctaatttttgtactttttgtagagatggggtttcgtcatgttgcccaggctggtctcgaactcctggactcaagtgatctgcccacctcggccttccaatgtgttgggattataggtgtgagccgctgtgcatggcccacccaactctttttttcttacaatttatttattgaagaaactggactgtttgtcttgtggagtttcccacagtcaggattttgtggatggcatctcctggtgttatttaacatgttctgctgtcccctgtgttacctgtaagttggtatttagttctagaggcaccatcagatttgttttttgttgttgattgtttgttttttttttttggcaagatcgtgccattagtaattgtgtagttgtctctttttgcgacgttagtcattgttgattgatttgtttctagggtgtgaacctggtatcgggagattacctgtgtcctgccattgcaggcagccccatgagctggctggacatgaggactgtgcctggggtttgtccagaattctggccttgcagtcccagagtcccagagctggaaggggcatgagacaggagccgatccactccctggtcccagaacagatggctgcttgttctctccttaggaggcagctgggtcctgccctttctggaagggcctgtctcctgtcctcttctgtctgatgtttgaatgacacccggtgggctgtcgttgctttaaagaacaaacacctccctttagccagcttcccactattcacttcaccaaaggtctgaggccttagaccattcgagttgaagggacagaatgtgaggtgcaaatgagtttaattcctcctgagccactattttaatctcctgcttggtctcctggcttctagtctcccttatcctctctccttatggtggccagagtggagtttaaaacattcaaatagaaccaggtctctctcctgtggaaagctctccatagactttccattatacttatttatctttttttttttttttttttttttttttgagacagcatcttgctctgtcacccattctggagtgcagtggcgcgatctcagctcactgcagcctccgcctcctgggttcaagcgattctcctgcctcagtctcccaagtagctgggattacaggcacgcactaccgtgcctgggtaatttttttgtattttcagtagagatggggtttcaccatgttggccaggctggtcttgaactcctggcctcaagtgatcctcctacctcagtctcccaaactgttggaattacaggtgtgagtcaccgcgcctggccgactttccgttatactttaaatgaaatcccaactccatagtccggcccacaccccctgcctgcttctgtgacctcacctcccaacttgtcgtcctttcctcctggtgatcaccatgattctgttgcggaggcctcctttccacacttggaacatggcaggctcgcccctgccacaggccctttgcacctgctgtttacagtgagctcattggctggtgcttcctcatccccggactcttcactcacatggcatctctttcaaaaggcctcccctgacgatccaatctaagcagctccctccagtcattactgctttaccctgctgtatttcctccatggtactcctcatttactgatcgtatctagtgtgtgcaataaatagttgattggctgtttcctcccctagaatggaaactgtttcagagcgggaactttgccttctttacctctgggtctccattgcccagaataggagatgctcagtaaatatttgctgagtgaatggatggaagcccaagaggcctcctggctcccctaagtagaacgtgcccattgcctgtttctctggggtcttttttttttttttttgagacagagtctcgcccaggctggagtgcaatggcgtgatctgggttcactgcaacctctgccttccaggttcaagcgattctcctacctcagcctcccaagtagctgggattactggtacccaccaccatgcccagctaatttttgtattttttttggggggggggacggagtctcgctctgtcgcccaggctggagtgcagtggcgcgatcacagctcgctgcaagctccgcctcccaggttcatgccattctcctgcctcagcctgggccctcctcccgtgctgagtagctgggactacaggtgcccgccaccatgcccggctaattttttgtatttttagtagagacggggtttcaccatgttggccaggctgctctcgaactcctgaccccaggtgatccacccaccttggcttcccaaagtgctgggattacagacgtgagcctccatgcctggctccctggggcccttttaatactcagcgccctttcttttgtctgagattggggactgtctcccttctctctcctttctttccttctggaagagattttgtagagaattgcaaatgatcacttgcccgtgtgtagctctgtcattatgccttgcctctgcatagctttgggacccgtagacgtgagagggaccaggctcagccatgaccgtcctgaagctggggccaggagccagggctcttcttgacactgcgttcctaagtcttgggtcctggaactgccgcctgattggcagaggcagcctcccttcatttatgccaaagaggggcagtgggcgtctgaattagtggacagtcgccattagccaatatatatatttttctaaatgcagttttatctctttggagcttgtgtggtgcacagatggctgcttaccaggatgttgccaaatagagggcttgtcaggcctgttcggtgaaatcaacgaaaagcacttctgttcagacgggggctgctgaagggcccaggaagtctctcagtcattttaagcagatgaagcacccccacgccccccaactccctgcccctcaacaaactcagtttctttgcctactgaatccataaaaagtaagtgaggtaggcaagatgatttcaggtggacaagtgctttttattttaatagctactttaagaaatgaatcctggcaagtgatactggttttccatgtatgatagttatataacgttagaaaacccgaatatgggctgtgcacagtggctcacgcctgtaattccagcactttgggaggccaaggcgggcggatcactcaaggctgggagttcgagaccagcctggccaacgtggcgaaaccccgtctctactaaaaataaaaaattagctgggcgtggtggcgtgcgcctgtaatctcaactacttgggaggctgaggcaggagaattgcttgaacttgggaggcagaggttgcagtgagccgagattgcaccactgaactccagcctgggtgacaaagccagactctgtctcaaaaaaaaaaaaaaaaaaaaaaaaagtaaagtcaggcccatcactttagggattccactaagagtgtctgggtggtgcccggggtaccctttatacccatggcagaaggaagaacatggctggtatttcataagctgagatttctgagtgcgggggtcctggttgaaccctgaagagggtctcgaagaatccaagctcatttctaggggtgagtacacttgatcaaccttcccttctccttccaggcagactagtgggaacctggagcagacgctgtgtttattcagtgcccttggagcaagggtggattgaaaaattgtcacttgcttttaagcttatcagttatgaacactgtatttcatgaaggctggagctccagccaagtcctttccagagtcctccagggctgggcagcctggctgggagctggggacgcctctggagacatgtcggccccatgtgtgtcctgagacagctgaccttgccttatggttagtccatttctccaaaggcaggagttgcggggggcctgtggatgagagccacctcctcccttctttctccctcttctgcctttttctctttctctactgtaaagatctttatcagtcacactgaatgctgtgtggcaggatcagggcactgtgatgatacctgttgtcaagagggcttactctggagggtaaagcaacttgtaagaaccccataagggaggcatctctcttgtctttggttgatggatggggctgagttaagagtctagtaagagtggaggtagggccgggcacggtggctcacaccagtaatcccagcgccttgggaggccaaggcaggcggatcacctgaggtcgggagttcgagaccagccaacatggtgaaactccgtctctactaaaaatacaaaaattagccaggcgtggtggtgggtgcctgtaatcccagctactcaggaagctgagacaggagaatcgcttgaacccgggaggcggaggttgcagtgagccgagatcgcgccactgcactccatcctgggccacaagagtgaaactctgtccccctcaaaaaaaaaaaacagtggcggcgggagcccccggttcctcaccgtcttgtcccgtacgtagcagcatgccatcctgactgcggagagtgcagacagcagcagccctgccacctaggagcttgcagtctgaggcggaggtggggagtgggcccctgcagactcctcatatggttaggaagcctgtcctctggaccagacacagtcctaggtgctgaggacgcagcagtgggcagcagagaagcaaagccctgtctggctggagcgtccatgcctgatgggtgttattctgcccacatactttgttttttcctttggagctgatattttagaattggaagattccacattgtgaatctgtttttcagtcttgagaaatcagaagctctgggaacactggctggactggccttccctcattacacctcaacttctagctacctgatcagtacagggctggtagcctcctgctcactgcagcccacctacacctggccacacctttgctacctgccccttccctgaaggacgggacgtacggtgtggggagcaggaggctgggggttgggagctctgggtgtaaccctgtgaacacagaggctgggggttgcatcccagtcctgtgcgtcctttgggacttcttggtcttggcagatccattgcgatgagaaaggaggggtcccggcagcctagcggggcgccctgtgggagctgggctgcagaatggccactgtggatttgccttcaagtattcctcctccctccccctcctgaattacctccaaacaaaatgacagaagttatgggaggctgcgcgtcgcagtacagaaactcaggaataacgtgagaagggacagagacagaaacactcgtggatccccgctctgggcctgcacctgcctggtacttatgcttcacttacctcatttcattctctgcatgacactgatgatcattatcttcattcttcatagaggagaaagctgaggttcaaaagggatggcgtctccaatgtcacctagctcgtataacagagctgggattccaatctgtctggtgccaaattctatgctttttctcccaccaccaattatatggtgaccctggctgaggtacttaacacccccgtgctacagtccaatgaagtagattgaagtgcagctcagagagaccaggtgtcctggtcaagactccaaaactctgttttgggtctcctgttaaggagttaagaactctggcaccctagaacattctggttgtttttaaaggaagggatcagatgggtctctggaacagctgggcttcttttgaatgcttagcctgagctaaggggagggtggagcctagagcagggaaaggtctgtcctgtcaggtgtcagataagctgaaaggtctcctggctgctggcctcactaatgagaacagaaattctcacttctcgatatgaactggaaggtcccggctgcagcctgggttacctgtgccatctgtattttaatagaacgtctattttaataagatctttgagatgcacagacagaaacagcatgtaaatcaataggtcactgaaacaggccatctgaaaacgagatctgcaaatgtgccaggaagggcttttgagagtgacagcaataaatgccccttgtggatggccagaaggtcccccaagggtatggccacatggaggcaggactcagccgtggtgcaagtgatgggaaccgagatgcctggcttccacattgcagctcctctgacccccagcccccttctagaaagggctgccagccctcttggtggcatctgcccctctctttcccctccatgaatgcaaatgcaagctgcagtccctccttaaatggattgtgtcccaaacgttcattcactcattcagttcacctccatcaatatgcgggtgccctccctgcctccagcagcccatgctcctgaagcagagatcaaccatggaatgtgaatccaagacagaagagggaggtgtggagaagaggtgcagggagccctggaggtcagaagaaagggggaccgcccaaggaaggctgcctggagttggtggcatttgaagtgggcctcggggactggacaggatgtctgaagggagagatggagtgggaagcacatccccaaaggagacagtggaagacaaggggccaagataaaaaaacaggggcccgctcagatcccaccttggctgtggtgtggattccctgctggggaacgtgggagatgaggctgttagggcggcctggggccatttcgtgttaggtgttgaatgctggggaaagaagggcaggtcaggctgtgggaggcttccctgctccccgcctcccctagactcagggcagttggtaccccagttagaatacaaaaacagagtcagtcagtgttatacatgaaacaattctgtaacatttgtgttattgtgatttttattaaatagaggtttggggcccaagggcctttgtgttggtgaggcagtagataatacccccaaatgtcccttctgattggtaatttattttatttatttattttattttattattttttgaggcagcatctccctctgtcgccaggctggagtgcagtggtgcgatctcggctcactgcagcctccgcctcccgggttcaagcgattctcctgtctcagcctcccgagtagctgggattacaggtgtccgccaccaggtccggctaatttttatgtttttagtagagatggggtttcaccacgttggccgggctggtctcgaactcctggcctcaagcgatctgcctgtcttggcctcccaaagtgctgggattacaggtgtgagccactgcactcggcctattttattttttattttagagatggagtctcactctgtcacccaggctggagtgcagtggtacaatctcggctcactgcaacctccacctctcaggttcgaatgattcttctgcctcattctcccaagtagctgggattacaggtgcccactgtcatgtctagctaatttttgtatttgtagtagagacggggtttcaccatgttggccaggctggtctcgaactcctggtgtcgtgattcccctcaccttggcctcccaaagtgctgggattacaggtgtgagccaccgtgcctggcctctgattggtcatttagctgatttagtcaagaaacttttggtttgaagtggcaagccccaattcaaattaatgtaaagaaaaaatgaagctttggggtttaggtaactggaaggttcaagggggacggattcaggcctggctggatcgagagctccagtggggtctttggacactggttctttcaccccgtctctaggctgtgccttcctttgggttgccttcgtcctcaggtaccttatccacgaagatggacgatggctgccctgggctgaccttctacccacttagcaataccaacaggaagagcaaatctgtttcccaatcatttcagcagatgtcccagggatggctcaccctggacagaaagtgagtcacatacgcatccctgaactttggccagaggggtgggatacactgattcatgaagtctaggtcttacgcccaccgctggttcccgggatgcagggacttggctgggagtataggagggatgggtcacctaaggaaacctggcatgttgctctcagaagctcaggggatggaagctgggcagtaaaaatgccaacagctgtccactctgctggccctagtggcttagttgatgctgatcttggcacggtcttgtcaacttggctggtggctgcagctgctggtaccctcccagacgcaaggaggcttccttctgccttggctggatgaggtgtgctttcttcttcacggatgcagctcgcgggatccccaagcctttggtagtaaacacacttcctgggctgtcttttctctgagtccattctgaacatcaaagcattcagcctgtgaccgcgctggacctggtctgagaggacagcctggctttgctcggggttggctctcggctctgggattggataatgtgtccccttcctgttttgcttatgctttgtggcacccagctgccctccaccccagcaggtccggattccttgaatacagattgcccctccttccagacgtctggccagtggatgcttttggttacgaggccctggctgagagaagggctggctctctgctatccatccccctggtggagggccaggcccagaggaagtctcagaggtcttagagataggcacctctagatggcaaaaacacgactgcagaagggcagaggagcggcctcaggaaaaacccagggggatatatgatcttgaacgtacatggtgtcgaaactgcggcccttggctttcccatgtgtgaaatgcgactaagactaatgaaagtcttttatgtgtgtaggcaaaaatcttatttagcaattcctctaccaggtgcaatttttttttttttttttttgagatggagtcttgctctgtcacccaggctggagtgcagtggcacgatctcagctcagtgcaagctccacctcccaggttcaagctattctcttgcctcagcctctcgagtagctgggattacaggcatgtgccactacgcctgtctaatttctgtattttttagtagagacagggtctcaccatgttggccaggctggtctcgaactcctgacctcaggtgatctgcctgccttggcctcccaaaattctgggattacaggtgtgagccactgtgcccggccagaacagatagtgtttaattccactttgtctgtgtctgtttgagctgctatcacaaaataccatagactgagtggcttaaaccaacatttacttctcccacttctggaagctggaaagtccaagttcagggtactggcagatggggtgtctcatgagggctcaaatcctgcatcacagacaaccgtcttctcgccatgttctcacatagcgaaggggcaagggagctctcaggggcctcttttccaaggcactgattccattcatgagggcttcactcctcctgacccaatcacctcccaaaggcccctcttcctcataccacggcagtgttagttaggatttcaacacagaaattttaaggggtgcacaaatatagtctatagtctatctactcttatagtgtatagtatgcttatatgaggcacctagaataggcaaattcctaggggcagaaagtagaatagaggttgccaggtgttggagggaaagagaatttttgttgaatgtgtacaaagttcctgttcgggatgatgataaagttctggaaatggacaatggggttagttgtacaacgatgtaaatgccactgaattgcaaacttaaaaaggggtaaaatgatgaaaaaaaaaaaacctaaacaaactttatgcaaaaccttaatatgtacaatagaaaaagcgttcctctggttgaagatggggtgggctggctggtggttctcgcctggtctctgtgaatgctcagctgagttgggaaccaaagtgccttggggactccagggaagcagcagccctcccttccccaacagcccacgttctgaagttgaaggtccctcagggctctgtcctgcccaagctcacacccccactgagggtcacgtgttgctggggaaggtcaggtcccgggagcaggtgcgggcagcgctgggccaccttctgcgagctcccttctcatcctgacatttccctttcctgcagtcttgggctcatggccagccgtcagccagcaccctgtggcgctctcctaggaggctgatctggtgagcggggacgtatagggggtcagcaagtggcccaggtggaacgtggctccgggccacgtgagtggagggcttgagttttgtgaccacaatgtggatgccctctgtgacctgctggcctgctttgagatgggcagcagctactccagggtgcgttgacctgcagagcaggcctcaggggtgggaatctgtatggcccctgaccccggcatggcctcagaaccttcctcagagtgcactctgtgctgctgcttgacaatctttttttttttttttggagatggagtctcgcactgtcacccgggctggaatgcaatggtgcaatctcggctcactgtaacctccctcccaagttcaagtgattctccttgccttagcctcccgagtagctgggattacaggcgcccaccaccacacctggctaatttttttgtatttttagtaaatacggggttttactatgttggccaggctggtctcaaactcttgacctcgtgatctgcctgcctcgtcctcccaaagtgctgggattacaggcatgagccaccgtgccctgcctgacaatctggtttttgaaagaaatgtttattatattttaaaaatccttgttccttgcagaaaatttggaaaacacagaaaagcacaaggattaaaataaaaatcaccttcagtcccacaagggagactgtagagatattaacgtttaatattttttttgtggtcttttttttctatgcaaaagcacaccctttcacgtaatatacttacatctgcatctacgtctgtttctctgtattgtaacaaaggcgggattatactttaggtacagtacattagtcaagacccttggtggcaagtgacagaggcccatcttgaattagccaaacaaaataagggggtttattggctggggtaacccatctgtggaaagggttgggcctcagaaacagctggatccaggggcattggcagaactcctctctgtctcgtcactgtgtctctttgtgttggcttcattctcttgggccatctgtctccatgatgttggatccatggttgtagatccttgtgggctaaacgtttcattttattttattattactattattcttttgagacagagtttcactcttgtcacccaggctggagtgcagtggtgcgatcttggcttactgcaacctccgcctcctgggttcaagtgattctcctgcctctgcttcccaagtagctggaattccaggcatgcgccgccacacctggctaatttttgtatttttaatagagacgaggtttcaccatgttggccaggctggtcttgaactcctgacctcaggtgatccacccacctcggcctcccacagtgctgggattacaggcatgagccactgcgcccagccaagggctaaacattttaatggctgaatttcccccagagaggaaggaaagctcctttccaacagctctggttagatacattccagggaggagttctgattggcctggattgtgtgtccatctcagtccctatgtgcaggggtgggagcggggagccatgattggcccagggagagtcaggggcgcactctggtcagagtggtgttgtgttacaagagtcctgtccagcgggagaggggcagttccctaaagcagaggtggggagcttcattacagaggagggagaggcaacagcggtagggccagcaaacaccatagacaaaagctgctttggagttggtgccagccacgggggtgccagcacggcgtgttgggtgagcacgtggaccctcaccttcatgctgatttcattggggttcaattggtaccatcccatgggcagtacagtttggcagtagctgtctccattatccatgctatcctccttgacccagtgagccacctctggggatctgtcagatgtgcatctttccacacacgtggaatgacgtagaatgaggtcattcacggcaatattatttgaaatagcaaaacactggaaacaaccaaatccctattcatagtgaactggctgcctaaattatttcacattcataccatggactaactacttaaaatagaatgatgaggccaggcgtggtggctcacgcctggaatctcagcgcttttggaggctgaggtgggtgaatcacctgaggccaggaattcgagaccagactagccaacatggtctctactaaaaatacaaaaattagctgggtgtggtgatgcacgcctgtaatcccagctactcgggaggctgaggcaggagaatcgcttgaacccagaaggtggaggttgcagtaagctgagattgcaccattgcactccagcttggatgacagaatgagcctctgtctcaaaaaaaaaaaaaaaaaaaaaggtgaagctgtctgtgtaactgcatcagcctaaaatgagtgacagaaagacgagttctccaaaacaaagagtttctttgggaatagcaaggggttgcaatctgaggtgtccatgctctgatggaccataggcacatccgaggggagtgggacaaggggaagcttttagaggaaaaagaaggtcatataagctgctttgaaacaaagaccgttggttacagaggcttatctcaggagggggcttttgttcttggtggtattggctgctgctaggagagggtcttcacagaagtggcttaactggaaagttccagcagggacagcccttcccggcagtttctgttacccgcagtcatgcgcgagggccttttcttcatggcttccttttgttagggtttgatgtaagccactccgtttttgatactgacaactttcacacttgatggaaagttctccctagatttttttttttacaaagacaaagttttgttctgtcacccaggctagagtgcagtggtgtgaacactgcagctttgacctcctgggctcaagggatcctcctgcctcagcctcctcacaggtgcacactaccatgcctggcaaagtttttgtagagactggatcccactttgttgcccaggcctggtctcaaactcttgggctcaagcgatcctccaacctcagcctcccaaaagtgggactctagtaaaaatacaaaaattagctgggtgcggtggtgggtgtctgtaatcccagctgcttgggaggctgaggcatgagaatcgcttgaacccgaggggcggaggttgcagtgagctgagattgcgccaccgcactccagcctaggggacagactgagactttgtctgaaaaaaaaaaaaacggaaaatagtacttcatctttgtgttgtgttggcttgtatttgcataaagaagctgcagtaggctgggtgcagtggctcatgtctgtaatcccagcactttgggaggctgaggtgggcagattgcttgagctcaggagttcgagaccagcctgggcaacatggtgaaaccctatctctaccaaaaatacaaaaaaaaaaaaaaaaaaaattagccggttggggcggggcatgcctgtggttccagctacttgggaggctgaggtgggaggatcgcctgagcccaggaggcggaggttgcaatgagctgagattttgccactgcactccagccagggtaatagaatgagaccctgtctcaaaaaaaaaaaaaaaaaaaaaaaaaaaaaaaaaaaaagcagcagcagctgcagaaaggtgtgtaaagatcatttcacaggctgaataagtggacagattgggacaaggataagacaaaataggccttctaataattttggcgtttgagccctgctaatgtattcctcattcaaaactcaacagaccagtttccttttggggtgatgaaaaagttatggaattagtggtggtggttacataacatcgtgaatgtacttaatgctactgaattgtatactttattatttatttatttatttatttttgagatggagttccagtcttgttgctcaggctggagtgcagtggcgcgatctcagctcactgcaacctccgcctcctgggtacaagtgattctcctgcctcagcctcccgagtagctgggattacaggcatgcgccaccacgcctggctaattctgtatttttggtagagacgcggtgggggggggcgggtttcaccatgttggccaggctggtcttgaactcccgacctcaggtgatccacccgtctcagcctcccaaagtgctgggattacaggcatgagccactgcacctggcctggctttctcattttctagctctctgactgtggacaagttacctgatttctcaaagaatcagtttctcatttgtaaagtgtggataataaaagagtctgtattctgcagattaaataagaggcataagattgagctctgtgcctggggaacaatgggtacaccctccctcccctttctcccctctgccaactggacatttgcatttaaatggggactcttgaagactaaaaacactctaaactccaagggaggaatggttggaatttcagaaaaattcatagctcttatctagggtaaggtctgggtcttttcctgtggagagttaagcttttaggtcctcctcacctgaggccccgggctgacggaggcattggaagcttgtaaaagtcagggctgagatgacctatctacaaagagcatttctggcaccctcatttcaagcaggtattcagtgtatgtgcataagaatgacgtggagaggaaaggagaaagaggtggaaaagggggagggagaaaggacccgatcaaggtcaacagcctgaaccagtcagaggcctcagcctggggctggattctggaggaaatgagacggtaggtgctacatcacccatggaaacaaaggagcagccacccagccaggaaaagccccaaacccttgaaaccccacgtttagcttgcgagctctctgctctcctgtatagcagaagttcttgaagttctgcctctgcttctcaccaatgcccagcagccactctggttctggacccggtggtcaccctctgccctcagtttggcatccctcacacagcctcatactcgcttctcaaaaggctgtctccattttgctcatgactgtcgacctagagaaagaaacagagagaaaattaatatagagagtttgctcgggccaaagttgaggacagctgccagggacgcttcaaaattaccttggggacggcgcccttcgacatttgttaaaagcaagtttttgttttgttttgtttcttgagatgtagccttgctcttgacgcccaggctagagtgcaatggtgcgatctcggctcactgcaacccctgcctcccgggttcaagcaattctcctgcctcagtctccggagtagctgagattacaggcgtgcaccaccacgcctggtgaatttttgtgtttttagtagagatgggatcttgccatgttggccaggctggtctcgaactcctgacctcaggtggtctgcctgcctcggcctcccaaagtgctgggattacaggcatgagccactgcacccggccacaagcaggtttgtaaaggcaaaggggacagggagtggggtgatatgaagttgttggatgggcattctaactggttacaggggtaacattggctgtgcgttgttgagctctagggtctgagtgatggcgtccagtgtatggctatgtggcatcagttagtttagggctcatgtagcaagtggcttcaagaagtgattacttagctcatggagcgggtgagagggaccgctgttgcttttcagtgcctctctgggcctgaccgtgacaggaggattgcatttctcagattcaacattgcctttttttctcacgacagtgaatgtcttgtcctcctggtttccctccgtctcgccgcctgtctgtctcatcctcctcctctgctggccttccacctgctgtcgtgcctgggccccttcctcttctctgtctcccttggtgatctccgcttggacatccgatagttcttccaagctgaacgtgtcccaactccaggtcttcattcttgccccgccaaagtcatccttcctgtagccttccccagcttgacttctctgcattgttttttgtttgtttgtttgtttttttttttgagatggaatctggctctgtcgcccaggctggagtgcaatgatgcgatctcggctcaccacaatctccgccccccgggttcacgccattctcctgcctcagcctcccgagtggctgggactacaggcacccgcccccacgcccggctaattttttgtatttttagtagagacggggtttcaccgtgttagccaggatggtcttgatctcctgaccttgtgagctgcctgcctcggcctctcaaagtgctgggattacaggcatgagccaccgcgcctggctacattgtttttatagatgaaaagagtccaactctgtaaaatattcgaagagatttattctgagccaaataagagtgaccaatgtagccccaggagatcccgagaacaagtgcccaaggtggttgggctacaggtggttttatacattttagggagacgtgagacatcagtccatccatgtaagatgtccattggtttggtctggaaggttaggacaaccagaatcgggggttttggagggtccataggtggattcaaagattttctgattggcagttcattgagtgagtttatctaaagacctggaatccatagaaaggaatgtcagggttaagataagcagccgtggagaccaaggtttcatcatgcgggtgacgcctccaggtagcaggtttccgagagatgagatagcaaatgtttcttatagacctggagtctgttctatgagtctttaggtccctgtgctgatgttgatgctggtcagctggggctgaattccaaaggcgaggagagcataaggaggcatgtccgaccaccccttcccatcatggcctgaaccagtttttctggctaactttggaatgcccttggctgaggggaagggtcatcagttggttgggggccttagaatgttatttttggtttacgttcttttttttttttttttttcttgagacggagttttgctctgttgccaggctggagtgcagtggcgtgatcttggctcaccgcaacctccacctcccgggttcaagcgattctcctgcctcagcctcccgagtagctgggactacaggcatgcgctgccacacccagctaatttttgtatttttagtagagacggggtttctccatgttgctcaggctggtctcgaactcctgacctcaggtgatgcacccgcctcagcctcccaaagtgctggaattacaggcgtgagccactgtgcccagccttggtttatgttcttattccccatgtccacttgtcagcatgctctgttgctgcctccatgatgcatccagagacggatcatatctcccatctccaccacggtcttttgaggccagtccatcatcagctgtcacctggattattgaggaacctttcagccagcctccctgcggccatgtttttccccttacagtccgtcctccgtaaggcagccagagtgatcctgtgaaactgtgggacacatcacatctctgctctgctcacaaatctccctgcctggccgggtgtggtggctcacacctgtaatcccagcactttgggaggccaaagcgcgtggatcacctgaggtcaggagttcaagaccagcctggccaacatggtgaaaccccatctctactaaaaaaacacaaaaaattaactgggtatggtggcgggcacctgtaatcccagctattcaggaggctgaggcatgaggattgcttgaacctgggaggtggaggttgcagtgaactgagattgcgccactgtacttcagcctgggtgacagagaattaaatgaatgcctgaaatttggttttagtgaatgaatgcttgaaatttggttctcatggtgagggtgacaggaagccatttcaaggccttagatagggggctcatatgatcaggttgacattttggaaggtccctgtagctcctgggggagacagtttgggagtgggaccagagtgggatcctggagattggctgggaaggtgtcagtggcttggagatgatggtggagggggattggggtgcattgactgagctgagagacgtgtaggaggcagagtgaaaggcttgttgttagagctgtgcttaatacactttcatggacacacgcgttacctggcatcctctggaaatgcagatgcgtaaaggtgggtctgggctgggtcctggagtctgcttttgggtgacattatgttgccggccggggacacacttagagtagcaaggggttgggtgtcaggcataagggaaggggagtcaggaacacattgtgcctttaattgcaagagaacctaggaggaggagcaggttgggggaaacgatgaggtcatttagggacacattgggttcgaggtgcctgtgagacccccccggggatgtggcatctggagctcagcccaggctggcggtggaaaatgaggagtcgtccttgggttggtgggtgcagccttggtgtgggtgaggctgagtgggagagggcatagggagggtggtcagagctgcggaagcccctgtctgtatgccgtatcgctgactcgaaaggtgcatcacctaggcaagggcgttggttaggtggtctaaccaccaccccttccgatcatggcttaggtggtctaaccaacacccttgatttagggcaggggtttctctcgctggttcctgctggttcatcagcctaactaaggaagggagcaggagcctctcccctgaaggaggcggcagcctgtgggcccatgagggaagccagccaaccctggctctctgcttctgatgcacctgtcccagtgggcctgtccggaagcatttgggtatccctgctgcccaggagccccacggtggactcaggcaaacctgggccccagagcccacttagccacttggtagctgcgtgagcacgcgcaaggtgctgcagcttgctgggccccggttttctcatccgtgtgatggggtaataatagtgccctcttcccgtgacggttgtgacgatcagtgagatggggtgtgtgacatgctgagcccggaggccggcgctggccagtgctcagtgaggttctgttatctctggagggtgtggcaaggtcaggatggacactggccttgcctcctccttcctgccctacccactgcatgcacctggcttggccccacctccaagcccttctttttttttttttttgagacagagtcttgctcttgtcactcagggtggagtgcagtggcgtgatctcagctcactgcaacctctgcctccccggttcaagtgattttcctgcctcggcctcccaagtatctagttttacaggcacccgccaccataactggctaatttttgtaaacttagtagagctggggtttcaccatgttggccaggctggtttcgaactactgacctcaagtgatccacccgcctcggcctccccaagtgttgggattacaggcgtgagccactgcgcccggccacaaagcccttcttacattgaaagtcccttggctgggcgtggcagctcatgcctgtcatcgcagcactttgagaggccaaggcgggcagatcacgagatcaggagttcaagaccagcctggccagcatggtgaaaccccgtctctactaaaaatacaaaaaatagctgggtatggtggtcggcgcctgtaatcccagctactcaggaggctgagacaggagaattgtttgaacccgggaggcagaggttgcagtgagctgagatcgcaccatggcactccagcctgggcgacagggcgagactccatctcaaaaaaaaaaaaaagaaagtccctgcttcctgttgggtcctcctccttgccttgagccctctccctccattcagatccatccccactgatgtctcctgctcgtctcttgtccattacttttttcctcctgagccctactgtaatgcttggagagtttggggggctggtgagggcaggatcatctgctgtctgttcatgtctcccaagagaccgcagggtccttcaggctgggtgggtgctgaatatccaatggggaccaggtaggcctgattcctgccctcctggagctcaccgtccagcgggaaggacaggcatcagactgatcgtgacaactgaggggctgggagcagggggctgggagcagggtgccgtggtggcagagagcacggggactgatggatgacatcggaagggagggacattcaggcagagacctggaggatgattaggatacaggaagacgaaggcttgggggggatgggagtgtgggtgagagaagggtctagacagagggagtagtgtgagtgggagggctcatcacaggaacccacaggctgtgtagaccggttggggcaggtgtggagaggaagtgagaggggtgggagatgaggctgggtggggccgttgggacaagggggtgcggagagttgggtttgagccacatggtcatgggagccatggaaggaggacagaataatccacctcacatttatttttcaccttcttcttttttttttttttttattgtggtaaaatacacatcacacacagtgtctcacttgaatcattttaaagtatacggttccgtggcatcaagtcctgttcacagtgttttgggatcctcactaccattctccagaccatgttcatcatccagatggaaactgtatccattagccgtcactcccacccccgcctcccccatcccgaagcaactaccatctactttctgtctctatggatttgcctcttctgagcatttcataatgcaggttgggtgtgtcttatctgacatgcttgggaccagatttcatattttttttggattttgctgtatttccattgtacttagtggttcaacatccctactctgaaaattcaaaatctgaaatgtgccgaggtcaggcacggtggctcacgcctggaatcccagcactttgggaggccgaggcgggtggatcatttgaggtcaggagttcgagaccagcctgtccaacatggtgaagccccatctctactaaaaatacaaaaattagccatgtgtggtgatacatgtctgtaacccagcactttgggaggccgaggcaggtggctcatttgtggtcaggagttcaagaccagcctggccaacatggtgaagccccatctctactaaaaatgcaaaaattagctgggcatggtggtgcacgcctgtaatcccagctactcgggaggctgaggcaggaggattgcttgaacctgggaggcagaggctggagtgagccgagatcgtgccactgcactccagcctgggggacagagtgagactctgcctcaaaaaaaaaaaaaagaaaaaatgtgccagtgagcatttcctttgagcaccatgttggcactgaaaaagtttaggatttgggagcattttggatttcagctttttggatttgggatgctcagtgtgtagatggaatcacacagtaggtggtggtctgtgtgtggcttcttccacttagccagcattcatccacattgtagcacgaatccgtaacggcacttcattccttttcagggttgaataatgttcctttgtgttggtgtgccacgttttgtttatccactcattcgttcatggacatttgtgtttctttcacctgtgatcattgtgaatagtgttgctatgaacacttgtgtacatgtttttgtttggaaatgttttctggagtggaattgctgggtcatatggtaattgtttgtgtaactttttgaggagcgtccacacttttcaacaatgggctacagtttctctgcattcttgataacgtttattgttatctgtttttttgcttttttctttttttctcgatgatggccatcctagtgggtgtgatctgcttttttttatttgtttgtttttgagacggagtctcgctatgtcgcccaagctggagtgcagtggcgcaatctcggctcactgcaacctctgtctcccgggttcacgccattctcctgcctcagcctcccgagtagctgggactacaggtgcctgccaccacgcctggctaattttttgtatttttagtagaggtggggtttcactgtgttagccaggatggcctcgatctcctgacctcgtgatccacttgcctcagtttctcaaagtgctgggattacaggcatgagccactgtgcctggcctttttttttttttttttttaattttgagatgtagtctcactcttttgcccaggctagagtgcagtggtgcgttcttggctcactgcagcctccacctcctgggttcaagcaattctcctgcctcagcctcctgagtagctgggattacaggtgtgcaccaccacgcccagctaatttttttttttttttggcatagagtcttactcttgtcccccagggtggagtgcagtggcacaatctcaactcactgcagcctccacctcccaggttcaagtgattctcctgccttggcctcccaagtagctggggttacaggcacgcgccaccacgcccggctaatttttgcatttttagtagagacggggtttcgccacgttggccaggctggtctccatctcttgacgtcatgatccacccaccctggcctcccaaagtgctgggattacaggcatgcgccaccacgcctggctaatttttgcatttttagtagagatggggtttcgccacgttggccaggatggttgattggcttttcatttcagcatggtccctgtgtctccttcctggagaatgggttgctcagtgcagtggctggagatgggctgggatgcgggtgccgttgtctaggtgagagatcatgcttcggggtggagtgatggaacagttagggaggtggcgaggactttgtgataccatggaggccacgggtgagggaagtagggactcaaacgtgactgattcgtgtcatgtccccagcggctagcgctatgctggcacaccgtcggtgctttacagatactcgcggaatgaatgtcagatccccaagaagaaatgggaacctggaagttcttggtgctctttctgaaggcccctcccctgtgggccccctgatggtcctgggcttgggcagcccctcttctgagggaggctgcggggttgtcttggtcggggttatgtgaaggtggggtgggcagcagagcagcttccaggggctacctccatcttctctgtgttcaagctccacagcccccaggagaccacgtgggtggtgctggggagctggagaggatggtcttttgggaggggcgcatttgagggctgcactgtgagctctgagggggcagcaaagcctttcctgagctccccaaggctggtgtgaaagcactttctgtctgcaggtcggtgtcccagcccagggacgctcctccattcttggcatttctctcggggttctgggagggtccagaaaggcctcgcccagcctttgcggttccctttcctctggcttccactccacgtgctgccctgctctcggcaccttccccagccgggcagccttttaacggatggattttggccttgatggagagggaagcgccttcgatctaaaagcttccaaaagcttctctctccacccttctgtctttcctctctctctccctcattttctcctctcctgttttctttttttttcctcacctgtgttctgtaaatctgtaaaacaaacacactttaaaaatgtcacttgtctcttctatctgcggcctagagtggggtaaagctgttacctcccttgggagtcggcttttgagctctgggcatgagtcagccctgttcctgatggccgcaggatgattggcagagaatcccagggtggctgcctcatggcctggggcctcgccagctggggcttcaaggctgtgacccagatagggaggtgggtgaccctttctgcctattccctgctcaccttctggtccagggagggacccagaatggacaggcaggggcctaggactttagccaaccttcgagcaacagcaaaaactctagacaggcccctgtggttacccacgtcagtgtgaactgtgggctcctgtcagccttcacctccgcctcctctctctccagggagagcaggtgtgtcctttctgggccagtcgggaatctcttgttcagcactgttggaggtgtgggggatgcatggggcacagggtgtggtctccagaaacttctagtgtgcattgcaagtgagaagcatcctcttacgccaggactctgattgggcagggaatactcagcgtactcaattccaggctttgctatggggctgagagaacgctcgctgtggggtgcagtggggctgcagtggccctttcattcattctttgcttcttcaatcactccttcactctgtatgtgaatgggcgagacgggtcggacacagctcttggagtcagagttcttgagttgttttttttttttttttttgagacagaatctcgctctgttgcccaggctggagtgcagtggtgcagtctcggctcactgtaaccttcgcctccccggttcaagcgattctcctgcctcagcctcccaagtagctgggactacaggcgtgcaccactatgcctggctaatatttgtatttttagtggaaaagggggtttcaccatgttgcccaggctggtctcaaactcctgacctcaggtgatccgcctgcctcggcctcccaaaatcctgggattacaggtgtgagccactgcgcccagcctagcgttcttgaatttgaattctgtttcttccactgactagctgtgttcctgttagcaagtcattcagcctttcccaagcctcagccgactcatctatatataagatgaaaacatcactccttgtcctgatcttcctcacggaactgtgcttggcagaggaagtaatcatacgcgtcacagcaaattatgacacaagtgtaaagtctttctgcgaacagatactttttgagggccttcagggtaggaatgctgcccttgaccctgtgggctacatggagatggtcaagacagtccctgtcctcatagccgttacggcctggcaggccaaataggcacatttcttttatttctttctttttttttttttttttttttttgagatggagtctcgctctgtcgcccaggctggagtacagtggcacgatctcggctcactgcaagctccgcctcccaggttcaagtgattcttctgcctcagcctccccagtagttggattacaggcacccgccaccacgcctgactaattttttgtatttctggtagagatggggtttccccatgttggccaggctggtctcgaactcctgacctcgtgatccacccgcctcggcctcccaaagtgctgggattacaggcgtgagccaccgcgcccggcagatagacacacgtcttggcagatccggctggaaggttctcagcatgctttctcatggggcactgatgcaacagagcccctgagcacctcagttcatccagcacatagtccctgcatgtccacaggagccaggagctgttcagaggctagatcggtgggcttggagtacgttggaggtgagcaatggtgaggcccggctacccccaccaagtctcgcagctgcaaccagctcctccagcaggaagagcctctgtgttctctccctttggcagctcctcgcatcccaccacgtacactcagttctgggtctaggggctgaagcagtgccttttcacttgggtgattttctggctggcctaggaatggcctcttcctgtcaccatttggttgagccaactggggcagggagaggatctgggaaggggagacagagatcctgaagagggccccttaattctcagtggctccagctgcctggcgaggccaccctcatgcctcctggggagaatatcgccgtgtctgtggatagtcccttccagcattattgacattgatgcatcatcttgtcacttaggtgaccagggcagctggaaatgattcggcaggaaggccgaaatgccggccttttctcagccctgattccctgtggcaggtgctgggtttgccccctggggcctcctgctctgggttgagatgtcgcatgagaagagcagaaggcagatgcggcagggccttccccacaccccgtccactttactagatgcctctggactctgaattttttttcccaatgaatatgtatttatgtgtgtgtgtgtgtgtgtgtgtgtgtatatatatatttttttttttttttttttgagccggagtctcgctgtgtcccccaggctggagtgcagtggtgcgatctcagctcactgcaacctccgcctcccagatttaagcgattcttttgcctcagcctctcgagtagctggtactacaggcacacgccaccacgcccagctaatttttgtatttttagtagagatgaggttccaccacgttatccaggctggtctcgaacttctgacctcaggtgatccacctgtcctggcctcccaaagtactgggattacaggtgtgagccaccgtgcccggccatatgtatttatatttacaataaaaatttaaaaatcagaaaacagaatgatagtcagtggtgccctttgtaacaatccaagaatgggttattggtatttaacaggatacttttgtaggcatttagcgaagcaaaaataactttctcttagaaaaacataacgcctgtctcaggcgctttcccacgcagctttgcttgtggacttcaggtttgtctaggtgggtgtttgcacggcccttgaactacccattccccagcagacggcttgatgaatgagcccagtggctcagcacaccagagcggcaggggtcggggagtgggactgaggccgagggatccaaagcagcagtgcaacaggcaagtcatccagggattgcccctccgggtccctcagaatcccagctgtgccacttacttgctgcaggaccttccagaaatcacttaccgtctctgagcctcagtttcttcatctgcaaaatgggagaataattctgtatctaccacataggggtgttgaaaagattaaatgaaataacgtacataaagagtttagtatagtgctaagcaaatattagctgatatgatgatgatgacgaataatagtttttttttttttggagacaggatctcgctctgttgctcaggctggagtgcagtggcgcattgcactctgcctcctaggtccaagcgattctagtgcctcagcctcccgagtagctgggactacaggcatgcaccaacacgctcagctaatttttgtatttttagtagagacggggtttccccatattgcccaggctggtcttgaattcctggcctcaagggatctgcctgccttggcttcccaaagtgctactattacaggcatgagccaccgtacctggctgatgatgaagaatacttaccttttttttttttttaagatggagtttcgctcttgttgtccaagctggagtgcaatggcgtgatctcggctcactacaacctccacctcctgggttcaagcgattttcctgccttagcctcccgagtagctgggattacaggcacacgccactgcgcccagctaattttttgtatttttagtagaaatgggtttcaccatgttagccaggctggtctcgaactcctgacctaaggtgatctgcctgcctcagcctcccaaagtgctgggattacaggcgtgagccaccgcgcttggtttttttgttttttttttttgaaatggagtctctctctattgcccaggttggagtgcagtgatgcaatctcagctcactgcaacctatgcctcccgggttcaagcaatccccctgcctcagcctcccgagtacctgggactacaggtgcataccaccacactggcaaatctttgtacttttagtagagaaggggtttcaccatgttgggcaggctggtcttgaactcctgacctcaggtgatcctcctgcctcggcctcccaaagtgctgggattacaagtgtgaaccgctgcgcctggcctaactattatctctactatctgtgtccagacaagaagcccgaggccaggagcagaatcaatccccagggaatagcaggagcttggtaacagaccaaataggtggggaagtggttaactctgtctcagagtttttaaaaattttgcttttatcatgatcatgatttctaattgacacataataattatacctattttgggggtacagtgtgatattttgatatgtgtatacaatgtgtaatcatcaaatcaaggtaattagcatatctgtcacctcaaacgttgatcatttctttgtattgggaacgttcaaaatctgctcttctggctatttgaaaatatacaataaattgttaattatggtcaccctacaaggctacagaatactagaaatgattcctcctttcggtacttttgtatccctgccaacctctccctaacccctctctttcctgcccttctcagcctctgctgaccactattctgctttctacttctgtgagatcaacttttttagcttctacgtttgcatgagaacccacagtgtgtgtgtttctgtgcctggcttatttcacttcccataatgtcctccagttttatgcatgtcgccacgaatgacgggatttggttctttttttatggctggatagtatcgtgcatatataccaccttttctttttctttttttttttttttttggagacggagtcttgctttgtcaccaggctggagcgtattggtgcgatctcagcttgctgcaacctccgcctcccgggttcaagtgattctccggcctcagcctcccaagtagttgggactacagtgtacaccaccacgcccagctaattttttttttttttttttgtattttagcagaggtggggtttcaccatgttgcccaggctggtcttgaactcctgagctcaggcgatctgcccgccttggcctcccaaagtgtaggattacaggtgtgagccaccgtgcctggcctataccaccttttctttgtacattcttctgtttatagactcaggttcattccacacctgggctgttgtgagcagtaaacacaggagtgcagatggctcttcaacaggctgactgcctttccctcagatatgtaccctgcagtgggatcgctgggtcatgtggttgttctgtttctagtgttttgaggaccctccgtgctgtgttccatagtggctgtgctcacttacgttcccaccaatcgtgtctcaggctcttgagcagggagatgaggtcaaccaaagcactgatgaaccaaattgcagtggtgatgagccgggtgccagctcagccgagtcctccacctcttggggtctatgagctccccatgtgttacacatttttgagttcattcagtgccaggccctgtgctggggcaggccagtggtcagggtgcgtgttagagcccagccagaggcctctgttctctctgggtcagaggtaggcttggccgggggagtgagtttctgctcatcacgtggagatcttgatcacccagtggagctcccggcggctgagccctctttctgaactttccagccgtgaaatactgcaggggccatggccagattccagtatgcccctggaggctcttgcaggtatcttgtcctttcttttctaatgtcccagagaaagaggccagcactgggaggaggcaggaggtttgatcgatctgcgctggattttttttttttttttttttgagatggagtctcactctgtcgcccaggctggagtgcagtggcacgatctcagatcattgcaacctctgcctcccgggttcaagtgattctcctgcctcagcctccagagtagctgggactacaggcgcacgccaccacgcctggctaatttttatgtgtgtgtatatatatatatatatatatatatatttttttttttttttgtagagatgggttttccccattttggccaggtgggtcttgaactcctgacctcaagtgatccgcccgctttggcctcccaaagtgctgggattacaggtgtgagcccccgcactggcctgcgctgtgttctgtaggttgggttagagcatgctgttgagatgagatcccagccctggtccctgggagccaaatcactgatgcttggttgcatggccatgggtggaaccccttgttctggacactcgtcttccaggaatgtaccacggtcacaagcaagaaaggggaggaacgaggatgggccaggtgccctgtctcagtgctggaaaacagcttcatgcatttgtctttctaatgagtgagaataacattattatagtaattgaatagaccaggcagatttaccctgaaatgctgtagtctgtccccattgaaactgttatttagtttgaaccaatgatggaagctcctaatccattatgtcaccaagtaatcttattcagaagagttaagacttaagacacagtcttagagcggagtggagcagtggcttagctggaaggccggttggctctgtgatagggaaactttcagtgctcacagactgctgggggatttcttagcatggatggtttaacacgcctctgtgctgggcactgtgagacggggctccttttcttcttgggcttgccgggaattcagccaacacatgggaccccttattacacagtgtatcctcccagtagcaccagtttttggtccaattcaatggtcagtgtttactttttttttttttttttgagacagagtcttgctctgtcacccaggctggagtgcagtggcgcaatcttggctcactgcaagctccgcctcctgggttcacaccattctcctgtctcagcctcccgagtagctgggaccacaggcgcccgccaccacgcccggctaattttttgtgtttttagtagagacggggtttcactgtgttagtcaggatggtctcgatctcctgacctctagtgatctgcccacctcggcctcccaaagtgctgggattacaggcttgagccaccacgcccgaccaatgtttactttttatgactgtgtaaatgttattcattgttatgtgagagggtaccataattatgttttctttcttgtataacttttcatgtttcttggagttaatgattaactcctgtttctgccattagctttgttttctatggacctatctttctttttcttttttttttaatttttgagacagggtctcactctgtcacccaggctggagtgcagtgccacattcatggcttactacagtcttgacctccagggttcaagcgatccccctacctcagcttcccaaatagctgggaccatgggtgcttgccaccatgcctggctaatttttgtggagagacatggtctcactatattgcccaaactggtctcaaactcctgagctcaaccaatcctcccgccttggcctcccaaagtactgtaattacaggtgagagccactgtacctggcctatttttctacttttatttttttctaccacaattactttaatagatggcccctccctaccctcccccatctccgccaagcttgcatccatcagataacctgtcaattccattctttcccccaggagatctcacttccagagcccccccatcctctagtgatagtatcctcccaagaaagggtgcaagggtgtgaatttttttgagctcttgcatatttcagaatgtctttattggttgatagtttgcctgggtgtgaaattttaggttgaaaataattttctttgagaattttgagagttataacatcattgcctactagattccagagttgctgttgaaaagtctgatgatatgcagattcatatttcttttcttttttttttttttttttttttttttgagacagagtttcactctcgtctcccaggctggagtgtaatgatgtgatctcggctcactgcaacctctgcctcctcggttcaagcgattctcctgcttcagcctcccaagtagctgggactacagtcatgtgccaccatgcccggctaatttttgtatttttagtagagacggggtttcactatgttggccaggctggtctcggactcctgacctcaggtgatctgcctgtctcgacctcccaaagtgctgggatgacaggcgtgagccaccgcacccggcccagattcctatttctctgtatatggtatgtatttatattttctctctggtgtcactgagaatttttcatttgcccaggtgttctgaaatttcctgacagtgtttgggatggatcttgtgtctttactgtgctgtgtacttggtggacccagagactcaggaccttcagttctggaagatgttcttgtactatttccctgctaatctttctgttatggtgagacaacagccattttattatgctcaagttctgtgggtgaggaattcagctagggcgtgttggagatgatggcttctctctgctttcacaacgtctggggacctcatcttgggtggctcagatggctggagatgactgcgacggtccactggggctgtatgtccgggagctgggctgtgttctcatagcatctactggagctgagatgcccaaggtggtttcttcatgtgcatggactgggatgtttggagcatctgggcatctctctccatgtagcctctccatgttcccagctgcagcattgacagtctcagtcaggcctttcacgtgcaggcttgctttctctggagcaaatgttcctagaggtagaggtggaagctgtcctgtgactcattcctgaaagtgaggtaatgttacgtctgtctcattctgttggtcaagactgagtcacagggccagcccagattcaagaggggagcacacaaagccatcagcaccaagagatgccagctttggataccagctgccagctcccctcccctttctctttctgggaactttcttggtcggctatttgatcttttttctcttccctcttttgttttctgtatctttatgtttttgttctactttttgggagatttcctcaacttagtcttttcatcatatttctttttctctttttcttttttctttttttttgagatggagttttgctcttgttgcacaggctggagtgtagtagcgtgatcttggctcactgcaacctctgcctcccgggttcaagtgattctcctgcctcagcctcccaactagctgggattacaggcacccgccaccagctactagcccggctagtttttttattttttatttttagtagagacgtggtttctccatgttggccaggctggtctcgaactcctgacctcaggtgatctgcctgcctcagtctcccaaagtgctgggattacaggcgtgagccaccgcacccagcccccttactgttattttaatgggcttcagaagaagtgggataataaatgcgtgtggtcagtctgacaggttcatcctggaagtctcaacaggcttcagaatatctctatttatatctcctaaaggaagtgagggtacatagttatcactgctgaaacatgattttttattgtgataaatgttatacatccacactgaatgaatcataagatgaatgcgcctttcctcgccatccaggtgaagggcgtttacgggctgggaaaatgctgatagcccacaccttgtgactcccggcttttgtgagtggtttctgaagctgccggaggccgtgaccttgtgcgctggctgcctctgctctgaccatgacgctgctccccccatggaggccaggcagtgccaggcagagccgctgactgcgcccgggaggggaactgctctgtcggcagtttctgagtgacggagtgcgtttgaagggctgggtgcgtaggcacctggcttggtgatttcttcagcgcaggggaggtggagcctctgccaccccctgcttggcacgcgctcttccctgagcaccgcccttccagcccatcccagcaggctgccttctcacctctccttccctgccccttggagggctcctgttcatttttgctttatgaaagccggccaggcgctcatgtctgtgatcccagcactttgggaggccgaggtgggcagatcacctgaggtcaagggtttgagacgagcctggccaacatggcgaaaccccgtctcaactaaaaatacagaaaaaaaaaaaagttaggctgggcatggtggcccatgcctgcaatcccagcacccagcactttgggaggccaaggcaggcagatcacctgaggtcaagggtttgagaccagcttggccaacatggcaaaaaccccatctctactaaaaatacaaaacttagccaggcatggtggtaggcacctgtagtcccagctacttgggaggctgagacaggagaatcgcttgaacccaggaggcggagcttgcagtgagccaagatcgcgccactgctctccagactgggtgacagagcgagactccgtttcaaaaacaaacaaaaaaccccctaaaaccccaaagccctacatgctgtccctgagggcctccacccctcccgtggcctcagcttccacctctgttcttgttacacctgtctttctgcttaggttttagtgctgttctgatcccatttgggtgtcccaggggcccctggcttgccgtgcgtccagaaagagagccttatcatctgcctctcgcaaagcgactctcctcctccgtctgtatcacggctgaagcgtccgtcattctgttttctgaaacccaggttacttggtgtgtttagctctcggccccccctttactttctgtcaccaagtcctcttaattttgctcccgaaatgccttatgactctgaccctttcatgtcatttctgtggctgtgagcgcagtggagggcagcgcccctcggccccgtttcggtcttcccctggcccctcccttccagccgctccgttctctctctgctgcttgcagagtcctccagcaaagctctgcaggtcatgggcaccccgcctcgggccccttggcttccttcctttgccctcgagagagggttcagcatgcggcaccttttcccagcgtccgcacagcgccggcactgtttgtactgtgtgtgtgtcacctgtctcaggcccataatgttttccttcaagcggctcaggtgttacaacttcagtggacttgtttcagaaggcacctttacgtcactaccataaaaggaaaatcagggtggcctcccacaaagagggtctctgtcaaagctcagtaagtgactgttacagtgaagaccaccccaggtgccctcgggggcccgcggggaggcaggcgtccactctgggaagccgtgggccatgggatctcctccccagcgggccccttctcctcctcagaggcagtgtagcaccgtggtaaacgccacagaccctggggccaagcctgcgcccaagcctcactctgctcctttccagcaacatgatcttggtccgcttaacctctctgagcctcattttccctgctgtaaaaggggttaatactatttccttcagtggattgtggtattaaataagagagtgtacatggatcacttcacacagtgccctaacccttgaggcctgtttgctggcatttgcccttccccgctactttttttttgagacggggtcttgctctgttgcccaggctggagtgcagtggcgcgatctcggcttactgcaacctccgcctcccgggttcaagcaattctcctgcctcagcctcccgagtagctgggattacaggcgcctgccaccatgcctggctaattttttgtatttttagtagatatgaggcttcaccacattggccaggccggtctcaaactcctgacctctagtgatctgcctgcctcggcctcccaaagtgctgggattacatctgtgagccaccgcgcccggcctgccctccccttttgccagcctgctgtgccctcgaatggtgtgatgtgtctcctgggcattgcgacactggtggtctctccgtcatgctggtcacgttcctctgcgtcctgcttctgtgccctccccttccccgcttctcccgtaggtcactgctggcctcttctctaggcctagatcagccgttgcctcctgtgcgatcccgtagctggtctcccaaggagaaccagacctctcctccctgtgacctcatggcacttgattctgtatctcttgtttcaccccatgaccccacagtccatgtttggcactcgggtctttcaggtgggtgtgccgtgcctgcaggatggttttctgcattttgcccggatcattttctcagatgcttgtgaatcacacagacgtcgcctcccacgctgagacactacccttggtccccaagaactcaaaacacacaagaagacgtttggccactgtcccctcctcgctccctgctgtggtacttgggccaggtggagctggctttcccatggcagtgggaaggagcaccggaatgggagtcagagatctcagggttgaggtccagctctcgtattttctgactctgtgaccccaggctcacatagaactcggaatctctgctggcttgggtgtaaaccataaagcacgcatcagttctaaaagctgcttgtgcggtaaaggcttattttcccagggtgaggatttgcccatgtgggtagattggtccatcgctctgagatatgtgcacgagggggccccaggtgcccccaaccacagggctgtggaggggctgcagaggttctcccaggtggtctgcccgtagggtcctgttcctcccgcctcctgccctttttcctagccctggtgcagtttaggacttcaggtcctgtcctcatctaatgcacctggagggcagcaggagtgtcttctgaagctgcagcccgagtctggcccgggcctccccttgtgcccacgtgcagccacagggtcctgcgcagggtgtagcctgcagcagagactccagccggctcatctcctgcacagcctgggcctcctgctctctgtctgctctatgcaggggaccagtagccccctttgaccctctcccccttctgtcccctcacttgagggccttggcactttataaacgggtgtccaggccaggtgcgctggctcacgcctataatcccagcgctttgggaggctgaggcgggtagatcgcctgaggtcaggagttcgagaccagcctggccaacatagtgaaaccctgtctctaataaaaatacaaaaaattgtttgggcgtggtggcgcgtgcctgtaatccaagctgcttgggaggctgaggcaggagaattgccggaacccaggaggcggaggctgcagtgagccgagattgtgccattgcactccaacctgggcaacaagagtgaaactccgtctcaaaaccaaaaacaaacaaacaaaaaaatgggtgtccagaagccagttgtgcttcctgacacgttcctcctggagacttttttttttctttgagatggaatctcgctctgttgcccaggctggaatgcagtggcacgatcttggctcactgcaacctctgcctcctgggatcaagcaatttctggctaatttttgtattttgagtagagatggggtttcaccatgttggccaggctggtctcgaactcctgacctcaagtgatctgcccacctcagcctcccaaggtgctgggatgacaggcgtgagccaccatacccagcccctcctgagacttgctccccacttcccacaagcctgggccgaggtgatttggaagtggggcctcttccttggagaagagaagagaggctcactgtggggtttgggcggttccctcggctctccagcctccacgtgcttgtctgcataatgaggctgtcgggtggcatctggtgctttctcccacggctgctgctctctgcatccgtgaaccctgggattgaagtaggggtggggattgccattttgcaatttctgcggagtctttttttttttttttttgagacagggtctcgctctgtcccccaggctggagtgcagtggcatgattacggctcactgtagccttgatctcctaggctcaagtgatcctcccacctcagcctcctgaatagctaggactacaggcatgcacctggctcatttttaaattttttatggagatgggatttcaccatgttgcccaggttggtcttgaactcgtgggctcaagccatcctcctacctcagcctccaaagtgctgggattacaggtgtgagccacctcacccggccaacgggggagttttgaatcaccaaaggtctagagttggtgccccaaatctttggaatcctctcagagtatgtgctgggatgggctgtgaccccgaggtcagccctgccaggtaggaacaggtgcgcaacacctgctccttctcaagctacccattcactccacctgttggagccttttgttcctgaatccagtgtcctcttccctcccccacactctgccaggtctgctgggctcatgccctttctcccttccacactggccccagcacaggcatgagggtcatcagtgcccgcatctccatgtctgtccccttggggcttggaattgagccatgtgcatatacccggggcctggcggttcccacatggcagctgggctcccgtgtccctgtctcccagcttagcatccacagtatgtggggcagcgagtgcccagatctgaagatgtccctgcccccgtccacctctgccttctgatcagctttctgccttggcccctcctcctccgtgcccattcttcccgttgatttgagccttggcaacaaggcgaccagccatgtttttgcagcgtaccaggcactgtgctgagtgctttctgggccttcctcataacgccccatgaggcgaggagtagtcacaccgttttacagatgaggaagctgaggcatggagaggtgagataacctgaccacacagtgaatcaggagtggtgctggagtattgattagcaggagtattgattagcgattgcatcccgttcccctctccctgcagcccctggcaacctctcatcaccgttctgtctgtggatttgcctgttctgtggatttcatggaactggaatcacacagcatgtggccttttgtgcctggctcctgtcactcggcaccgtgcttcctaggtgcatccgtgttgtagcatgcatcagttcttcattccttttctttctattgtctttatagtcataagctatcagtttgtttttatttttattttattttattttattttgagacggagtctcactctgtcacccaggctggagtgcagtggagcgatctcggctcactgcaagctccgccttccgggagcttccgctattctcctgcctcagcctctcgagtagctgggactacaggtgctcgccaccacacctggctaattttttaaatattttttttagtagagacggggtttcaccatgttagccaggatggtctcgatctcctgacctcgtgatccgcctgccttggcttcccaaagtgctgggattacaggcgtcagccaccacagccagccacttatttttatttttttgaggtggagtctcgctctgtcacccgggctggagtgcagtggcacaatcttggctcactgcaacctctgtctcccaggttcaagtgattctcctgcctcagcctccttagtagctgggactacagacatgcgccatcatgcctggctaattttttgtatttttagtgagatggggtttcgccatgttagccaggttgttcttgaactcctgacctcaggtgatctgcctgcctcagcctcccaaagtgctgggattacaggcatgagccactgcccgtggtcctatttttatttttgaaaattaattatttttgcttcatttctttttatgggtgagcagtattccacagtatggaacaaccaaattttatttatctgttcgttggcggatggacacttggattgcttcccccttttggccattatgaatcatgtttcttgttccttttggtttggttttcccgagaagctctttgcagcccagctgtctgtattcctctagcttggctatttggaaagcaagagaaagcgtagctgagcgtgggtggatggctgggagcgggtgtggggaggggatgcaggaaaggggagtttcaggctttgggagaaccccgtgtggagggggccttacacctggccccagagccacctgctgctaggtgagtgtttttcctgtggttgattattaaccaacggttatgatcctgagagtagatccccaggctagaactggtgctcatttgagatgccagaaatgttttccaaggcatttaaacggccttggactcttgcttctgtctccacttggagaccacatcaacattttatgagttataatcatcatcatcatcatcatggtctacattgatatagaacttcatgttttatgtcacagctgttatttttttaaattaattaattcatttttttgagacggagtttcgctcttgttgcccaggctggagtgccatggtgagatctcggctcactgcaacctccccctcccaggttcaagcgattctcctgcctcagcctctcaagtagctgggattacaggcacccgccaccacgcctggctaatttttgtatttttagtagtgacagggtttcaccatgttggccaggctggtctcgaactcctgacctcaggtgatctgcccacttttgcctcccaaagtgctgggattacaggtgagagccacctctcccagccacagctattatttttaactccttggtactttattacccctatctttgcagatgaaggaaacaagacacaacgaggtaacttaaccaaggcctcacagctgggtagcaggcagagccaaacttgaacccaggaatcccttgattccaagtgtagggtgctctccatagcgatgtgtgagacatgacggttgcagtgacctcaagatggtctgaggcagagccctccgagggtggggaggcgaggagcctgcaggcctgggtgctgtcacaggggctccgccaggggtctgtctagctccgtctgggtgaatcatggcctttgacttctcagcttccactccaggcccctttgaccatttcctccagagatttgcatttggccaacgctggctaggacgcgtcctggtctccctgagcctccccatctgcccttggatctcctgtgcttctagggaggaaaagaatcccagagcagggaacctcagtgccatgtgagaaggggcagggcctccaggactcccccaggtggcagaggctctctgacctgcccttccagcctgcccttgccacccttctctttgaactgagtatgtaatcttcctcttctcttcctctggcttctctccatcctccttttcccttctctgctttccaagctgtccccatctccagcccctcctctcatgggtccttgtgggtccctgggtgggtctggggccccgcgtcgttagagttgcatgcgagtatggggctgggtcgcttgagggctgcggttttcaatctcagtgccatgacatgtggcaagatagatccctgtgggtcacaaagaagttgtcacctcggctaaggatttaccttttgcttctaattagagcacattcaaggttatcccttgatataatcacatcactttcacctcctcgtgtgtgatatgtttgcctgagtgggagaaaaagggataaaactgcatcaagcaccgcgtcacttaactctatcttatctcggtgccagctggtggctgggctgggctgtgcctggctgtccttgggagggtggctcatgtgtaaatgtcattgtcctggggcaggacaaggctgagcatagctgatcagagcaggggtggtgaggcagaagcaggatttcatcttcactgtttttggctctctaggccaaggctagaacctggggcctgggcactgcattcatttcctagggctgccattaccaaggacctcagatggcttaaagccgcagacatttattatttcagttctggaggccagaagtccaaaatcaaggtgtcagcagggcgacgctccctctgcaggctctagggaagaatccttcctcgcctcttctagcctctggcggggtcggcaagcctcagcatgcgttggcttgcagccgcatcactcctgtgtctgcctgagaacacggggcattctcactgtgtgtttcttcacattgttgccttcccttcttttttttttttttgagatggagtcttgctctgtcacccgagctggagtgcagtggcacgatctcagctcactgcaacctccacctcttgggttcaagcgattctcttgcctcagcctcccaagtagctcggatgacaggcacacgccaccatgcctggctaatttttgtatttttagtagagacggggtttcgccacgttgaacaggctggtttggaactcctgacctcaagtgatccacccccgtctcagcctcccaaaatggtgggattacaggcatgagccaccgctctgggcccagttcagatgtttttgagggtggcagtcatgccttctgcccaccctggcaccccctctggagtcctggacacagcgctggagcttgcatgaggctggtcaccactggtgctcatgtctgctctagcgccttccaagctcccaggcatcatttgggaaatccttctggtcagaagctgccatgtgctccgacttgagagtctgcctcgcttcctagagaccggccccaggagcttatccagtgtccagtagagaccggccccaggagcttatccagcatccagggggaaaaggcaggggagaggggctcagctcagggagtgttggatgctgcgcccttttgaccgggactcagggccttgaacaataatcatatgtgccctggtgccatgagcgtggacaccttgtgcctgatggggaaaaatagacagcatgactgtgtgtatgagcgtccagtgaccggtgatgttaaaaccagctctgtcctcctctggactgtgtgtttctggagagccagggctgctgtccatcaaggtgcctgcgagccatctccagaggccctctgctaagcccagagtcgccctatagcatctggtgggggcttgttttacttcccctccctgcgtgcttttccttgctgggctcctagccttacaggggagcagctgtcattctcaccatgggcccgaagaggacctgagggtgatgccctcctgcttgatcattcttcctttcccccatcatggctcttaaaggccaggcccattgaggaggagctgtggctgcttgggagagggccaggtggaggaggcggtgagcctgtgctggacccagctctgttgtgcacacaggcaggtgagtgtctggcagagcagccagactggagcctacggtggtaatgtccaaggccgtacatagaaggaggctggcagctctagctgagaggtagcaggagctggtgcctgcttttgtgtgtgtgtgagagtgtgtgcacacacctaggagctatctcagccctgctggtttcttgagccagttacagcctggatcaggcgggagagtcccccctctccagccatcaaaacttacatcaacaaggtccaggaagaaagaaagaggaagggagatggggagcaggagacagggattgccaggttcaggttaatggggtggaatggattctctgccaagccaggtagtccccaggcccctgatgtggctccctagttggccacagggagggctggctggtcaactgcaggggcaggcaggggtacacatgacccaggcctagcctggaagtgttctcagcctggtcctgctccgtgggctcagggagccaggcaggatggggtctgggcctggaaacctggagggctgggctctgtagggagggtgggtttctgtcatgaagaaggtgtggggttggaactgtcgcttcgctggcaggacttgggctgggaagaggggcagaaggattctctggaggtggcagtgggggtgctttgatcatttacgcaggacctgggggttgggctgactctctctgctgcttcagagcggggctgtagaggaggacacacttgtaaagttgggggctttgacggctcagcccagccctcttcggcttttaatacggttctcccagccccctcgtcccctcctgggtacagccagagcttgttcaggacactggagtccctcacccgggaattccccaggctctgcccagctggccctgttgtgcagccgtggctctgaaggctgatcccatgccaaaccgtctgcttggtgatgggaccgcacacagcactccccggtcaccagcgagggccagatggaaagtggggagtgtgtgagcgcggcaaacttgtcgcagtcatgttgccatggtgacacaactctgtttagctgcctctctaccgtcctagcccacatggactaagttaagttttacctgcggttgcacggcaggcagccctgtctcccgaggacagctttttgaccagggcctgtgtgtgtgtgtgtgtgtgtgtgtgtgtgtgtgtgtgtacgtgcagaggggctcaagggagaatgaatccgcgtttctcccctcctcttctcacacccagccccagtcctggatctctttagccccgtggttctcagactttgccgtgtagcagaatgacctggagagctcgttggagcgcaggttcctgggctcatcactggagagcctggtgtgcacctgcaaatgtgcatgtctttcgagttcccaggtgccgctggtggtccagggaccatacttagagtagcactgctttagattttggtgcattggagtaaagaaaatgctcccaattctggtttctgcattgtatttttttttttaattggaaacggagtttcattcttgttgcccaggctggagtgcagtggcgccatcttggctcactgcaacctccacctcccaggttcaagtgattctcctgcctcagtctctctagtagctgggactacaggcgtgcaccaccacgcccagctaattttttgtatttttagtagagatggggtttcaccatgttggtcaggctggtcttgaactcctgacctcaggtgatccgtctgcctcggcctcccaaagtgctgggattactggcgtgagccacccaacccagcctgcattgtatgttaaactgtgtccgagagcccagtcactcttggaggagagaagggaaggcgcaggcaggtcctcactcacctcttttggcctcttcacaggaagcaggagctggccaacagctcggatgcgaccctcccagaccggccgctctcccctcctctcacggcacctcccaccatgaaggtaagaggcttcgattcaggaaggcagggaggggagagtgtggggaagttgtgaggccttgctgtggctttggctccaggcccagcagcgtccgtcgcagtggggctgtggagtgtcctgacacctcggaggaggtgatgttcagttaagcaccagtgcgggggaagcatgacaagagactcagggtgtctgtgtcaaggggcggtgaggacattggggttgaaatggggttggcaggactcttggtaattggtagtggagtttgggaacaaggggcccagccaggaggaagccgggggatagaaggcagctgcccagaaggactgcctggggctgggctgtggccctcctgggacttgaagggcatttgcatgctggtctgccggcctctggctggcccttctgagctgggcctgttcacggcagtccccatggaagggttggctggaggttcgggtcggggtggcagttattttcttatcagcacttccttcgtgagcctttttcctggggagaccacagtccaggctgctaggcccaggaccttctcactcctggacgggagccgagggagcagtgcccttctgccaccatgaccttcccccatcacttttcagtccgacgcctcggcaggatggccacacaggcctgagctggtcctcagaggagacttttggctcagccagtgtttctgcataggctggcatgcacgctctccctccctccctccctgcctccctccttccttcacactctgtggagtgagtgaggactagtgctgaagaagtcacctgcctcctgagtcatctgaggggacatctaggccagctcctctctgtcctggggctgtgctctgagtggctcacagggagatcatcaggcatctcttcctcactgctctgcatcacccctcctcttccctgaacctaatcttttgcaagatgacaacccataggaagcagataaaacccatccatcttcctgttgttgtcctgtatccgatacccatcacatacagagccatgtggtatgcctcgaggagcctgtgtgttgaggggtagccagagcctgccctgggtgggttaagtggtcagcggtgggcgggggggcaggacagggtgcagggctgaccaaggagagctgtgctgtcttccttgtgcagtacccagagggcagtggaagccagaccaccttcactagcctagtgcctgccccagcacccagctcagtgttggtatctgagccgggtgctgggccagctctttgcacagggtaatgctaagaagcctgtcaccattccgagtgtccccttggtctacaaaggtggctgtgggatgcttgtctctgtcctcacagatggcaggagtttgcagggagaagtctgacagtctcctaggaggagtccctgaattctcttggcagattttacttactcatgtactcatttaattcatttaatacccagtatttatttgaattttgtattagttaggactcttggttgtaagtgacagaaacataactcactctggcttagtcataaaagggtattttttgcctttgtaattgcaagcatagacggcaggcatgactgcatccgcaagatcagtctcattctttctctcttctgtgttggtttcattctttgtcaagctgcctttgtggcagccgaagggtggtagcagctcctacctgtgaagtaaccccagtgaaaagaaaagtatttttttcccccagtagttctaacaaagtcccagggaagaagctcattggctggcttaggtcacatgtttgtccctgaaccaattaccggcaccagaaagatgaaaggctctgattggccagacctgggtctcatgaccgcccacctaaaccataagaactgagaatgagggaggggtaggtcctagagggaaatggcggtggtaccatgagaagaaggggaagggatgcggggcaggcaagacccacagctttccgccacatgtgcgcatgctcagccaggcccagtgctcggttctggggaccttgtagtaaaccagacattgtggtccctgctctcctagagcttgtcgtctagctagggagccaaaaatggaaaaataatgtcaggaatgagggctgcacagttaaacgtggtgaatattctaaaggtgaagcacagcatagctcagggggaacgtaaggttaggaggtggggggactctaacctagtctcggagagggtcaggtagggctttttgttaggaaatgatgtttcagctgagccctgaaaattggataggtgctagttaggctaaggtggagtccgagtggaggagagtgttctagattcttgctgttcaaagggaggccaagggaccagcaacacctgcaccatttgcgagccccttagaaatgcagaatctcaggttccaccccagaccactgaatcagagtcagcttttttatttttttgagacagagccttgctctgtcgccgagccagagtgcagtggcgcgatcttggctcactgcaacctccacctcctgggttcaagcgcttctcctacctgagcctcccgagtagctgggattacaggtgcgtgccaccacgcctggctaacttttgtatttttagtagagacggggattcaccatgttggccaggctggtctcgaactcctgacctcgtgatgcgcccgcctcggcctcccaaagtgctgggattacagtcgtgagccaccacgcctggcccagagtcagcattttaccgtcattttccggtgatttgtatacacagggcagcttgagaagcactgctgtgggcctctgcacatgcgttcaggcagccgagagagagaaggcgacagcaagaggaaccggagggagatcagaacagctggtgaagccggagttagtgttggagaggctgggcatgcaggcagggaccagatcaagcagacgcttggacattctgctgaagattttagagtttattcctagttaagagcactggagtcattgacgatgttacccagaggattaagatgagacctttggaaaatcacctggcgtcatatggcgaatgcatggcagggaacagagtggagaggggatgagctgaggctgctgcaggatccaggggaagagatggaagcctgactcggaggggccggtggggttgtttggaagtggttggagctcagattttgcaggtggtgaattgatgagatatgagatttggggagaaggaggcggcgagaatggctcccaggtttgtagccagtagatacatgggacaaccattctctgagataaaggttggtgcaggagggaggattaggattcaattcttcttcttttaaattaaaaaaaaattttagggacagggtcgtgcgctgtcactcagcctggaggatagtggttcattccaaggtcactgcaacctcgggctcaaggatcctcccatcttagcctcccgagtagctgggaatataggcatgtgccaccgagcccagctaatttaaaaattttctgtagagacaaggtcttgctgtgttgcccaggctggtctgagactcttgggttcaagccatccttccgccttgacctcccaaagtgctgggattacaggtgtgagccactgcgccttgtcgaggggtcagctctaagcactgagttggacgtgcctgaggctcagaagaacattctgtgctggaggtaaacatctgggagcccttctcctagagaagggaatggaagctttgggatgagtgagctctccagggagaggatagagcaggaagagaggttcctgaggcggcacctcgaggtggtgctggggtctctgcagaggaggctgggcccggacatggagggagaagcatttcacggtggtgggaccggcagcagtgccagctgctgctgagaggccaagtatggtgcagagtgcacagtggccactgggctccgcggcctggcagttgcaggggatgtaactcagaccagccctgggaggggtggggcggacagcagatggccgtgtgttgaggaatgggtggagatggtcagagtcagagggtgtagacggtacttgtgaggtggggagcctggagtgtgaggaaatgtggaaaggagggagtgaggcaggggtgctcaggaatctggaccacagcagggattatttttaacatattctttcaaaaaatgatttgtgagcatccactgggtgcctgcccctgctgcgctctcccatgacaggctgtcgggaggggcctcaggcaggcccggagcagagcagcctcagggaaagctcagcagctgcagtcaggaggtgtcccttcctcctcctcccccgtgttctgtccttctcccctttgagctcagctcagcaatttcccagcctgtgactttactgcccaggccccaagcacaaggtcagagctgggaagggaggaaggggtgagggattgtcctggggactcagactgggtgggggtccttctgtggttggggttgggggtcagtgtgtgtggtgtgcctggcccgaggggttctctttgtgactgtcatttgggttcattctgtggcttagcctgtggctgcagttaggagtctgtctatggcgaggaggttttttccctttgtgtgaaagctaaccacccatgagggatttaaaaccacaatcctcaccttacaccagcctgctcaccacaggagtgtcccatcacaaaagtgatgacattgatgaaataatattgcagctcctgcttgcaggctgtccgattctttccttaacttgagttccctgagcatagcgactgtgtcctattctttagggcccccaggccctggcttagggtggggacctgggacttgtttatggttgctgacagtaagggacatctcggtcagaggaggttgttctgctcctgaccctccactcctctgcttctggctggatcctatatcccagcaggcctgggctccacctgccacatccctgtcctagggtgaggccaggcctctgcttggttgacacatcccaggttattatagcacactgaggccagagacgccctggatggaggctggcctctctccgagggtccctggccctgagggttcatgaatcagttctctgttctttgagcctcgggcagtgggagaaggcttcacctggttctcttggcagtgcaggctcagggagggtgtggcaggggcacccctttggttgattagcttgggagtcacagaagattagggatgggcgatccatttcctttataggtaaaccagaagccccaaggtaggaaatgactctcccaacgcaacgccgttcctcctcgagtcaacagaataagttacattctttatttttatatttattttttgagacggagtctcactctgtcacccaggctgaaatgtaatggcgcgatctcggctccctgcaacctccgtctcccaggctcaagcagttctcctgccccagcgcaccaccacaccccgctaatttttgtatttttagtagagatggggtttccccctgttggccaggctggtctcgagctcctgacctcaagtgatccgccagccttggcctcccaaagtgttcagatgacaggcgtgagccactgcacctggcccacgataagttaaattctaagacccaaactagttttggtcaagtgctcggctcatctcatgcttgctcatctcacgcttgcgggcccagggacggcctcttgtggctctcccactgggaagggctggctggagcagtagctggcctccagcctgagagtctctgccgcgctccccccgggcccccaccctcactggcgtgcctgctgctacccgacctatacgcaccctcccccacctctttgctgtttgttttgaaggggattttttttttttgctaatatgaagctgataaaaagcaaccaaagagatgctgaccagatgggctgaataagatcccagttcccagccagagctcaaactggctggtgccgggtgggctgggagagggacttgaggctgcgtctgtgggaataccgtaggtggtttccaggcccatatttttttttggaagctgattttcatgccccaatggatcagcaggcatttagggaggggcagttgtatgcccagaattgtgctgggtcccctgggtcacatcgaagctgcagtcctccaccctcagagagcctgccgtctacaggggccctgactgagccggagaaaccagatggctcagtgtgacaaggctcagatgtgaaatgtggcttctcagtggggaggagaggagggggaaacgctatgtggggaggtggggtgggatggggcggggtggggcagccggaaggggccctaatggcaagcatgggggtcagggtgaccccctgggaccatagacagtaaaaccttcccaggccccgtgaagtaaaggggttgattctcctgattctctcgacgctcatgggaaggacacagagcatttcactgaagtccactctgctgggacttgacctgaccttgtccctggagccgcaccgggccctgagctggctcggtcagctgggaggtggcccttgctcagccttccacacccctctttgtgcaagtctgagggcagcccctctcagaccttctcctttccagaagaggataatgtgcgcttggagttcccactgcagggaccagcagaacgtctggttcctcccttgctccttggcacgtggctctccacggccagggaatgcccccaccgcctctatggtaggtaaggcaggtgtgcaggcttcctatggcagggaagaggatggagatcagaggagcctcctccttgcccctctctatccctctgggcagagctgggctgggcctccctttctggctcatggattacccaccggccaccctctctccctggggttggggggtggtgtgtgggggcttctgttccagcttgtagcacagcccccggcctgatttcgtctcttcttttgctcctggttcctgcctcctgtcttctgttaggctgtgcagggagacttgcccctcatcagggtggagtgacagtgtcagccccccatacatccaccagctctggatggatgaagggaggaggcatttgtgggagggttgacgggagcctttctgggctggggcaggaagggctgaaggacatcagcaaggaggtttggtttttccctcttcaagaaaaccctgtgtagggacaggagaggacagatatatattccctccatccctactgctggagggaggcccttgctgaagctctgtgggtcctgggagagtcacctctggtctccacatcgattgtgtttctgttgccgctccggacatggttgggatacaaccccatctcctcaggagccactgcccattgttctcttgactccatccaggagccaaggaagttcacatctgatttaatgcaggcatgaggaagggcttatttggctactgagggtgaggatgctaactaggaggctttaagaacatggagatgttggctgggcatggtggcacatgcctgaaatcccagcattttgggaggctgaggcaggaggatcccttgaggccaggagtttgagaccagcctgggcaacacagtgagaccccatttctacaaaaaattaaaaaattagctgggcctattggctcatgcctatagtcccagctactctggaggccaaggtgggaagatggattgagcccaggagattgagcttgcagtgagttatgattgcaccactgcactctagcctgggtgacagagcaaaatcctgtttcaaaaaaaaagaaaaagaaaacatgaagatgtctgcatgtgcacctacttacctgcatgcatttccctcctcacctgtgcacacctgagcatgtgcctattttccctaattctgttctcttttttttttgagatggaatctcgctcttgtcacccaggttggagtgcagtggcgtaatctcagctcactgcaacccctgcttcctgggttcaagcgattctcctccctcagcctcccgagtagctgggattacaggcacacgccaccatgcccagctaatttttgtatttttagtagagatggggtttcaccatgttggtcaggctgctctcaaactcctgacctcaggtgatccgccggcctcagcctcccaaagtactgggattacaggcgtgagccaccacactcggccttctgttcatgttttaaggccaacttgcttatgcttctggaagattactctaggtgtaactggatttttaaaaatttgcagacacagaaatgcgtaagtcttaattgtattgtatactttgactaatgatacacccacgtgagccataccttgatcaagaaacaggacatttctgcaaccccagaaagttcccattgtcctgacccagtcaatcataactgcccccttgaggagcaaacagtgttctgatttttttcaaaagtgagttttgtctgttctagaacttaattttttttttttgaggtggagtctcgctctgttgcccaggctggagagcagtgacgcaatctctgctcactgcagcctccgcctcccgggttcaagggattctcctgcctcagcctccccagtagctgggattacaggtgcccactaccactcccggctaagttttttgtatttttaatagggacggggtttcaccatgttggccaggatggtctcgaactcccaacctcaagtgatccgccttcctcaggcctcccaaagtgctgggattacaggcgagagccaccatgcctggccggtgactgtttatatgaaactgctacactgtttgccaaatggtcaggccatcttatatcctcaccagcagtgtcatttgagttctcgctgctctgcatcctcatcaacatttgccattgttggttttgacaattttagctacttgaacggtatctcattgtggttttaatccacattttctcatgactaatgatgttgaatatttttcatatgcttattgactattcttatagttcttttttcccttcctccttcctttaaattcggtagtcttcttgtaggcgttctttacatattctagtcaagttcgtttcttttcttcttcttctgtttttgaggcagagtctcgctctgtcgcccaggctggagtgcagtggcccgatctcagctcactgcaagctctgcctcctgggttcacaccattctcctgcctcagcctcccgagtagctgggactacaggcgcccgccaccacgcccggcaaattttttgtatttttagtagagacggggtttcaccgtgttagccaggatggtctcaatctcctgaccttgtgatccacccacctcggcctcccaaagtgctgggattacaggtgcgagccactgtgcccggccacttctttttttttttttttgagacggagccttgctctgtcacccaggctagagtgcaatggcgccatctcggctcactacaacctccacctcctgggttcaaacgattctcctgcctcagtcccccgagtagctgggattacaggtgcccgccaccacgcccagctaattgttttattctcagtaaagacaaggtttcaccatgttggccaggctggtcttgaactcctgacctcgtgatccgcccgcctcggcctcccaaagtgctgggattacagacgtgagccactgcgtccggccttcttctttttagaaatagagatggggactcactatgtcgcccgggttggtctcaaactctggcctcaagtgatcctcctgcctgggctcccaaattgttgggattacaagcttgagccaccatttctggcccatttcttttcttgtttttattttttggatacaaggtctcactttgttgcccaggctggagtgcagtggtgcgaacagagctcactgcagcctcaacctcctgggctcaagccatccttccacctcagccccccgagtagctgggactacaggctggtgccaccacgcctgactaatttttgaattttttgtagggagagacagggtttcaccctgttgcccaggctggtcttgaactcctgagctcaagcgatccgcccaccttggctttccaaagtgctggtattacaggcgtgagccaacgcgcctggcccatttcttttcttaacggtgtctttaatgagcagaagttttaattttgaagaagtctaattatggactctttccttttatgtctgtagctttgtgtgtcctaagaagtctttgcttaccccagctcacaaagatttccttccatgtattcttttagaagctttatttttatttattttttttgagacagagtctcgctctgtcaccaggctggagtgcagtggcgtgatctcggctcactgcaacctctgcttcctgagttcaagcgattctcctgcctcagcttttcgaatagctggaactacaggtgcctgccaccacacctggctgatttttttgtatttttactagaaacggggtttcaccacgttggccaggatggtctcagtctcctgatctcgtgatccgcccgcctcagcctctcccaaagtgctgggattacaggcatgagccactgcgcccggctagaagctttattgttttagctctaggtctaggataaacttgttttaatttaattatgtatggcagtatgttggggtctaggttcatttattgccatatggatactctgttgttccagtactgtatgttgagaagactttcctttccttgctgaactgctttggtgccttagtcaaaactctgccaggcatgtaagtgtacacgtgtgtttgtttattgtctctccaaccatggtgtttctctgcatcagggatggaaaatacgtgccatccgtgccgtcagtccaccgtttggctcccgtggcagatactggtaattgatcatggcactctttcccaagagcttagacgtggtctcagaatcctgttcaacaaagcaccgtaggcagccactggcagtcatttggagttgtcatttgagataaatcacttctggcatctctgattgaaattgtcacaagaggttatttgctgaaggtcccacagctggtgagtggcagagccaggatgtgggctcaggtttgtctgtgtgggtctgaagcctgtgctgtcttccccacctctacagactgctctgcgtgaatcatttcaacaggtcgcttcatctccgtgacctccagtctcttcacttgcataatagggacggtggccaccgggaggagtgggtgtgggcagtaatgaggtcatccacagaatcgctagtggagcatctgatacgcaggtgctccgtgatggactgtgacgatggcgatggtggcgatgacaaccatgatgagtgagatgcagatgcccttgagaaacacacagtcagggcttctctctagggaacccagagtagctggctcatcagagtcccttgcctcttcttatgtatcttcgggcccgtggccttccaagctggaggccccagagcggagccacgcttcctcaagtttgctaatagggtgcgagccacgggcttcggcctaggcgtctaggccagctgagctgtgctccttctctctttgtgggaggaacagctggctgggttcgtagaattctctttctgggaaccttcttgccctctctgttgattctccagcccatctttctttcctttggattggccacatgatcctgcctgccacaggggcgattaatccagctccttcgacctggtcctggacccctctgaggttcttcttaagaagttgaagcaatagagggttgtagctaagaatacagtttctggagccagtctgcctggggttaaggcttccccacttcttcttctttttttttttcttttttgagacagagttgcgctcttgttgcccaggctggagggcaatggcgcgatctcggctcactgcaacctctgcctcccgggttcaagcaattctcctgcctcagcctcccgagtagctgggattacaggcatgcgccaccacgcccagctaattttatatttttagtagagttggggtttctccatgttggtcaggctggtctcgaactcctgacctcaggtgatccacccgccttgggctcccaaagtgctgggattataagtgtgagccaccgtgcccagccatttttggtatttttagtagagacggggtttcaccatgttggccaggctggtctcaaactccagatctcaggtgatcctcccacctgggcctcccaaagtgctggaattacaggtgtgagccactgtgcctggcccccccgtttttaaaattcatttttattttgagatggagtcttgctctgttgcccaggctgaagtacaatggcacgatcttggctcaccgcaacctccgcttcctgggttcaagtgattctcctgcctcagcttcccaagtagctgagattacaagcacatgccaccacacccagctaatttatgtatttttagtagagatggcgattaaccatgttggccaggctggtgtcaaactcctgacctcaggtgatccacctgcctcggcctccggaagtgctgggattacaggcataagccactgcacctggccaaagcttaccctcttcttagctgtataacctctgtgcatctcagtttcctcatttgtagaatagggatgtattagccctgtctcccattgctctaaagtaatacctgagattggataatttataaagaaaggaggtttggccaggcgtggtggctcacacctgtaatcccagcactttggaaggctgaggcgggcagatcatgaggtcaggagttcaagaccagcctggccaatatggtgaaacctgtttctactaaaaatacaaaaattagttgggcatggtggcgagcgcctataatcccagctatttgggaggctgaggcaggagaatcacttgaacctgggaggtggaggttgcagtgagtcgacatcgtgccactacactccagcctgggcaatagaatgagactccatctcaaaaaaaaaaaaaaaaaaaaagaaaggtttaactggctcacagttctgtaggctgtacaggcagcaggatgctgacatctgcttggctgttggggtggcctcaggaaacttttattcatggtggaaggtgaagggagaggaggcaggtcacagggccagagcgggagcaagagagcaagggagggtgccacacacttttaaacaaccagagctcgtgagaattcactcatgatcttgaggacggcaccagggaggggatggtggtaaagcattcatgagaaatccgccctctgatccagtcagctccctgcaggccccacctccagcactgagggttacagtcccacgtgagatttgagtggggacacaaatccaaactatttcaaggataataagagtacctgccctgggtggctgtagtgaagattaattgagataatatgcctttattgcttaaaacagaggtatgcagtaagtgctacataaatattagtcattattattcctccaaaaaactttgtttctgaaatgtgcggagaatagcaatgcttagagagaccatctagggggaagtacaccaggttttcggtgaatatagtttgtcaggacgccctgatttctgccctgccaggtgcccacagctgaggggcctgtctgtggaatgaataaggattgaaattgcattttgtgtgagtggccttccaagagccttgtggatcagactccaaaccctgcctgataaatgtggatgcccttgagggtcttggaaaaaggctaaaaaccaggatccagcccagcatctgagccagacctggaggaaggaacatctttctgggttgtgctttcacctcttgccttctgaatctgacccaaacaggggtctccagggtggcagaaagaacctgcagggtcgccatcctcatgaaggtttttgggactagactgagtcgagacttggataattcggggctgggagcgtcccaaggctggcgttggaatgagttttatgagcagtttgtccctatcataagtttctttcctaacttcttttgcctgcagctgatattaaaatgagtctgtatttcggggacagatgctgaccttgtggggaacacgggaagtgggggcagggcctaaaagccatggggggccaggcgggggagcagctgccctttcagcctgggtggcccatggtctggggggtctgggctgatggtaaaggtgaccggctgccaggccctccttccttagccctctcctttttccttttctcttttttttcttttttgagacggagtcttgctctgttgcccaggctggagtgcagtagcgcgatctcggctcactgcaacctctgcctcccgggttcaagcaattctcctgcctcagcctcccaagtagctgggattacaggcaccgccccatacctggttaatttttgtatttgtagtagagatggggtttcgccatgttggccaggctggtctcgaactcttgacctcaggtgatccgcccgcctcggcctcccaaagtgctgggatgacaggcgtgagccgccgcatctggcctccttttttcttttttttttttttttgagacaggttctctgtcgcccagactggagtacagtggtgcgatcagggctcactgcagccttgaccttctgggcccaagcaactgtcctacctcagcctcccaagtagctgggaccacaggtgtgcaccaccacgccctgctaggcttaaaaaaaattttttttaattcgtagaagcagggtctccctgtgttcctaggctgtcctttccccttttctcgtcgtgctctcctcctctttctgcctgttggtgagggctcggctctgtctccccttgatggcattcagaagactgatagagcacttggcattcagggcgtcacccaggggatgcccccaggggccccccaacccccgccccaggcatgccacctgcctttggaagcctgaccagccatcccaccccagaacttagcccctgggtctgtgacatccctgcctgttttcaggccctgcctcccccgctggatggtgctgggtctggggacagagcccttgcctcttcctgggatttagaaaccaactgtgtgacatcgtgcagttcagtcatcttctgtggacctcggtttcctcatttatagaacggagctcaccctgtagggttactgcagggattaaaggaggaagcaggcggacgagggcttcgtcaagtgccaggcttctgcaggtgtcgaatatcggcacataatggacaccagtggttgttatcatggtcaatatgccaaacacgcatagggtggtttcattgataatcccgcccttctgctctgccaactgccatagactctactccactgagaccggctcagcagcgggatgctgccagattctgtgttctgccacccacccccatccgctaccctcttccatgagtgtcatttacccgacactcaagcctgctgtgtctgggacttcagaggccagtggatggtgggttctgtgttgcttcgtgaagggatgtcccctgcgtagatctgtgcctcagtgggttcctcctgtgtgtgcccctcccgctggcttcttctcccggagcccccccggcagactctgctcttggcggagtgtggagctggagtttcaggccttggggtgtagatttgattcctagggttgctgtaacaaattactgtgaacttgatgggttgaaataaaaggataaaaggaatttcttatcttttttttttcttttttgagacagagtctcactctgtcacccaggctgaagtgcagtggcgtgatcttggctcactgcacctttctgcctcctgggttcaagcaattctcctgcctcagcctcccaagtagcttgggattacaggcaccggccaccacacccggctaactttttgtatttttagtagagacggtgttttgccatgttggtcaggctggtcttgaactcctgatctcaggtgatccacccgcctcagccccccaaagtcctgggattacaggcatgagctaccatgaccggccaggaatttattttctcacaactctagaggccagaagtctggaattaaggtgtcagcagggccgttaaagtgtccgcagggcctttaaggtgtctgcagggtcgttaaggtgtcagcagggtcgttaaggtgtcagcagggccgttatgtgtcctcagggccgttaaggtgtcagcagggccgttaaggtgtccgcagggccgttatgtgtccacagggccgttaaggtgtcagcaggaccgttaaggtgtccttaaggtgtccgcagggccatgttcccgccagaggctcgaggggaagctccttgcctgcctcttccagcgcctggtggctccaggccggggactgcacagctctgctctcttcctccgtcttcttcacatgtctccctcctcttctccctgggggtctctcctctgtgtgtctcttttaaggacacttgtcattggatttagagcccacctgggtaatcgggatgatctcatctcaaactccttcatatcttaaaattatatctgttatctcagtctgttccaactgttacaacaaaataccttagactgggtaatttacaaacaatagccatttatttctcaccattctggaggctgggaaatcccagatcaaggctccaagagacccactgtctgatgaaggcccacgttctgcgtctaagatgacaccttcttgcagtgtcctcacagggaggaaggcggaaggacagaagggattcgctagtccctcaggccttctatgaggacgttaatcccgttcccgagggtggaacctttattacctggtcacctccctaggccttgccttctaattccatcaccttgggagggacatgtacattcagactgcagcatgggtaaagaccctttttccgaataaggttacacactcaggttcctggatacagacatatctttttgggggccaccattacggggtcagggctgccctctcctgggagttcctggtgggagcttggtgaggtccccgaggtctgccagcacctgctctccttgtgtagttgtaagtcattcaagtgccactgcaagggtgtgtgtgtgaggtacagggtgttgcggggctgggaggacccagtgcagctccagctcgcacaaatggggtagagcatgatcttcccatccctgctgccccgggacctggtacatatggggccatggcaggtgcttcataaacacttagtagttggtgcttaataaatactcacaataggttttcagtgaatcctcattgattgatccagccttaaggatgtggcaatgaacaaaaaagtgcccagtattttctttttgtttttgtttttttttttttttttgagacagaaattcgctgatgttgcccaggttggagtgcaatggtgcgaccttgcactaccttggcttgtggcacgaccttggctcatggcacgaccttggctcactgcaccctctgcctcccaggctccagcgattctcctgcctcagctggagtagctgggattacaggcgtccaccaccacacctggctatttttttttttttttttgagatggagtcttgctctgttgccaggctggagtgcagtggcacaatctcagctcactgcaacctccacctcctgagttcaagtgattctcctgcctcagcctcccgagcagctgggactacaggcacctgccaccacacccagttaatttttgtatttttaatagagatggggtttcaccatgtcggccaggctggtctcaaactcctgacctcgtgatctgcccgcctcggcctcccaaagtgctggggttacaggtgtgagccaccgcgcccggccttttttttttttgagacagagtctcgctctgttgcccaggctggaatgcagtggtgcaatcttggctcactgcaccctctgcctcccaggctccagagattctcctgccttagctggagtagctgggattacagacgcataccaccacgcctggctaattttttttttgtatttttagtagagacagggtttcaccatgttggccaggctggtctcgaactcctgacctcaggtgatccacctgcctcagcctcccaaagtgctgggattacaggcctgagccaatgtgcccggctgttttcttagataatttttatcagttttttttttgtgtgtgtgcaaataaccagcaaatatgaaacaccccagacaattttaaataaaatgatatatgcatattataaagttaaagcaattgtaaagtacagagaaaataaaaaaatgaataatgtcctaatcataatcctaccatccagaaatatccgttcttaccatttgctaatcgtccagacatcttggcatcatacacatagatagaggcaaacataaatgagatcacactgtttgtgctcctttgtaataaaaagagctaaattcaattttccttgcattaaccaatgaagaagaaataaacaagtggctcagaaggagttgctgaagtttagagaaatgtttcctctctgtaagagatattaatttctctaagagttctctaacagtgaggaaaaagattatgataaaaagaaccaaacctttggggtagagatattaatttaaaaaggtaatttcaactttatacatagagtttggctccctgctttgaatatgagagccaggtgattttggaggagagagggtgcagtctgggaactttgagagtgctccttttgaggggacctgctgttctcagaagagcaggctgagtaacggtctgcacctcccgatgcctggagggagtgttccgagccgaggctcagttacacgtgggaatcaagcagagcccatcccgggagcgaatagggtttgttagcaaatgacatggctgagctgatttgatttggcagcaggactgagaagtttctgaaatgtcagatgttaataggatggctggttgtctctaaacgggaagccagaagtgggggtggatggccaggtgacgtcatctgctgtagaggaggaatttgggagaaaggaaatcggaggtggggaggggaaaagagggaaggagggaaggaaggtggaagatggaggagagaggccagtggcattagaggtggagggggaaagcgaatgagatggggctggtggaggagttgggtttgcttccccgaggatcatacgttggggtgggctgagtttgtcctcaaatatgttttgtttggccaacgtgatgttaaaaaagtcatttcaatactctttagggggaatgtcccctccccaatcctatttcgtcttggagcctatctcctccctggcccctgaagacatctgggtttgagaccttcgccagatgacctgtggctctttctagagctctttcctccggggggctagtgggtggcccaggctcagaggagaccagaattgcatctcatctcagagatgccacggggatcaggagaattctgagaatcaggtgagatccccaatggtgccctgacctcaggccgctgtggattccagatgtggtttgggactgtatgtgagtgccccttggcggtggtcagttccgtggtctggagagctgggctgtgggagacaggaggcaggagctgttgttcttgtctgcttggcctcgtgcttggtgactcttggttgaaccgggaagatgtgatctctgttctttgaagacataatggccgtgaggaggcaaaaaccacagaaaccttcctccaaaagtgatgcaagatgagccattcgcacactgctgtaaagaaatacttcatcgcagtataaatagaagaaataccggagactgggtaatttataaagaaagaggtttaattgactcacagttctgtatggctggggaggcctcaggaaacttacaatcatgaaggagaagcatgtgccttcttcacaaggcagcaggaaagagaagagcgaaggaggagcttccaaacacgtaaacccatcagatctcatgagaactcactcactgtcacgagaacagcgtggggaaaaccgctccctcgctccactcgtggggattacagttcgagatgagatttggatggggacacagagccacacctttgccagggtaagctgaaaaggccaggaattccttggatgatgctctccctgccttttctctaagaggaggttgattctggggcttggaaggtacttccaggccatccttgaaggagctcagagtgagtccttcaaacaccagcatggaaaagcagaaagcaggccagcagccctggtcagatctggggagcaggaaggcaggtctgcaaagcctggggagggtccagtcagcgtgggtccgggccgggttaggaacctggtcaggccaggcccggtggctcatgcctgtaatcccagcactttgggaggctgaggcaggtggatcacctgaggtcaggagtttgagaccagcctggccaacatggcgaaagccctgtctctactaaaaatacaaaaattagctgggcgtggtggtgggtgtctgtaatcccagctactcaggagagtgaggcaggagaatagcttgaacccaggaggcagaggttgcagtgagccgagatcatgcccgggcaacacagcaagcctctgtctcaaaaaaaaaaaaaaaaaaaggaacctggtcagagcagagcaaggctgagccctgggggtaactgagcttagtgttactcatggagacaggagccaggaagcgcaggcctcccggcccatcggtgcagcctgacttggcgtggacagccccacctccacgggcagcgcccacgtcctcttcacacggcatgatctctacaacccatctggcagctttctccttgctgtgtgagtcttgggcctggtagaagtcaggagtgtacacttggttttttgaggagcagctcagagcttcaaggcagttacaacaataaagctcactgcacactgtgaatatgtgccccagagcatcgcagttttgaggatgggagtgagactagcagttcagaggcacggtgccagagtgtcacagttcctccctcccccaaagccagcttgtacttgaacctgtcgggaggtttctattagtttcttatggccgctgtcacaaatacccacacacttagtggcttaagacaacacaaatctatcatcttacagttctgaggttagaagtatggaatgggtctcactgagatcaaatcaagatattgccaggggctgggcgcgatggctcacatctgtaatcctagcactttgagaggccgaggcgggcggatcacctgaggtcaagagttcgagaccagcctggccaacatggtgaaaccctgtctctactaaaaatacaaaaaatactacaggtgtggtggtgcatgcctgtagtcccagctacttgggaggttgaggcaggataattgcttgaacccgggaggcggaggttgcagtgagctgagattgtgccactgcactccagcctggggaacagagcaagactccatctcaaaaaaaaaaaaaaaaaaaaaagatattgccagggccgcattccctctgtaggctctaggggacaatctatcctcttgtcttgtcagctcctagaaggccacctgtattctggccccatacctctgttttcaaggccagccacgctggagcaagtctttttttttttagacagaatctcgctctgtcacccaggctggagtgcagtggcgcgatctcggctcactgcaagctccgcctcccgggttcaggccgttctcctgcctcagcctcccgagtagctgggactacaggcacccgccaccgcgcccggctaattttttgtatttttagtagagacggggtttcaccgtgttagccaggatggtctcgatctcctgacctcgtgatccgcccgccttggcctcccaaagtgctgggattacaggcgtgagccaccgcgcccggctgagcaagtctttctcacaccgccgtctctcggattccctctcttctgcctccttctcattacagagactcttttgatcacactgggtggacctgggtcatccaggcccctcttcccatctcaggggcagccttaattctagccacaacctgaactcccccttgccgtgtaacctcacacattcccaggttttggggattgggacaagggcacctctgggtgtgagtgttggggggcagtatttggcctatcacaaggacccaccttcatgggctttgctcagccctgggtcctcatcggtaaaatgggcatctctacctgcttcctagaggaaacgctagccggcccaccgcatagcgggccttccctctgtgggattccgtagttctgggactaattcttcacctgcctgatctcattgctttgcgagcccgtgactgatgatacagtatcagatgtccttgccctgatcccacgaccatgagacttgaagggcagggatggaatatgtgcctaagcatttccacagagagaagagggacatagcacacacgctgcagcctagaggagctatgaccttggttttgttaccgtcagtcagctgcttgctgatcccccagcaactgatggaactgatggaaaagccaccactccttgagagaggaagaaaaaagacttatgttaagctttgcccagctctgatttggacttgcccaattttacttgaaggaaggtgccactgtccgcttcccattcacacatcgccgccttcctcctgtctaaccggaatctttcttgttgcaatttcagcctgctggctctccatgcggccggtggggaaacagcaaagctggttcccacattgataatgacacctaatcctgcaatctgcttctgtccggttctaatcacgccactgcttccattcccaggaggaccaggggcaccctctgtttcgtcctgacaaagtggactgcccatggttgacagcctgcgtgtccggggtcgcctgggggtgagggtgggaaggtgtgggagggacggaggcactgccttctgctcagatgagcagcacgtagataaccctccccaggtgacctgcctggcatggaaagtccttctcgtggtcccccaggtcagatagcgttgcctggctacggggcagtcagcgaggctccggcagggcgagtaaacaggcacacatgtttaaaattcaatatcactggcgggcaaacactccagcagcgccttccagcccaccgataatctctaattctcctcgcttgatgcgtgtgggggccctgcaccaagacccagatggtctcttctgggaattggtcgtcagctgttgtgagggatggggagtcggaggggtgggggtgcctgttatagcctcagcctcatgcagactatcatcctgatcgctctgggcaggctcctgagagacccaggggctggtctggattcactggctgggtggagcttccagggtggggagctgtctgggttcagtggctcacacctgtaatcccagcactttgggaagccgaggcaggacaattgtttgaagccaggagttcaagaccagcctgggcaacatagcaagacccctccatctctaaaaaacaaaaactagttgggcatggaggtgcacccctgtagtcccaactacttgggaggctgaggcgggaggatccctggagcccaggcatttgaggctgcagtgaaccatgatcgcgccactgtactccagcctgggcgacagagtgagactccatctcaagaaaaaaataaaaggcaggggcctttggggaagctcatgcagatttttgtctgccttaggctgcaaagaggctgtggagggggcagggcctgtggagggtgtgcacccggcacaggcgatgagtgagggctggaatctggcaatcccctggccccgccaggtgactgtgatgggcggcatttattaagaggaaggggcgctccatctgcagggtggaagaaggtaagccagcctcctctttgctggaggtgcacacatggctgcctggggcatctcctggggcagttggtgagctggttcctggtaaagtcattcctcgtagggatcgtttggcatcaacacggggagcaggtgaggttgactgttttccctgcatgtgcctcatgcttgccctcttccgttgcttaggcttccttcccttcactgcctttcatgtgtcaaggccaggttatgcccctggtagcgaagaccccgggactgccctgcccgctccacgaaggcagtgggctcttttcctgggtacactgttttccagaggcagccctgatccaggctgcctgatagttccaggagatgacggtcctgagggtgcgtgcccagcctgaggcttgtaggttcagcccagatcaccagtgcaccccgagatcaccagtgcacccacttctccagtagacatggcctgtccttcaggcctcggcggggggcagggccacgatgagcagactcgtcactcccggagccacctgctcacccttccctctgagtagcagtgtggccaaaggacctcttagtttagtgccttggggccatggtgtgtcacctgccctgtgtggctctgaaaggctcctggaagggtgtctgggactgtaagaggccagggctctcttcgagatggatctgccttgcagtcaactgcctcagcctcatccatcgctggctgggagatgactgggagcgggattgtcccagctgtgggtctggaccttcctacagtggctcaccaggcccccttgtggccaataccatcagtaccacgtgggagcctgtggctggggctgggggtctggggaggggtgacaagcccaccagctgctcactgtgccagctgggtagacccagagggtcaggcggccaggaactgggaccctgccctgcgtccactgccagcctcagtgctcaggtgccctggagacctcattagaccaggcctgagtgggggcgtggcagcttcctcactcggaatggaggcttctgttacttgccctgcatttcctacttcgcaggctcatccggagtttcagtcttgcctggcctgcagcttcagccgaggtctgcaaggcagcaccagctcttggagccaggtgggaatgccgcttcaaacacacgcacagaggcatcgctctcttttggtagaaaagctgtcggattgtaagacaaaggctgaggtctctaacgtgtcctcctttactctgggtgcctcttgtgttacctttgtgcttgagtggggggaccacaggacaggcaaattagaaactgcacgaaacaaaacaaaatgcaaagaaaaacaaaatcgaaacaaagaaatacaatataaaacaaaacaaaagagctgggcgtggtggctcacgcctgtaatcccagcactttgggaggccgaggcgggcagatcacttgaggtcaggagtttgagaccagcctggccaacatggtgaaacttcatccctactaaacatacaaaaaaactagccaggcgtggcatgccctgtaatctcagctgcttgggaggctgaggcaggagaatcgcttgaacctgggaggcaggggctgcagtgagccgagatcgtgcccttgcactctggcctgggtgacagagcgagactccatctcaaaaaaaaaaaaaaaaaaaaaaagaagaagagaaaccacaacagatgataactgtttatggcaggagggtgtgtgcagctgggtcatggtccccaccttttgggctgataaacctggctgagggctaggcgtgtatgtttgccatgagtgagtgtttcttgtgtgtgtgtgtgtgtgtgtgtgtgtgtgtgttgggtgaacgtgactgtgaatgttgtggttagttctttgttgtatcaagtgttttggatgtctgtttgggggtggatattgtgggacgccacgttggtgtgaatgtatctgcagctgagtgattcccccagccaggacagcggggccgggaaggacagcccattgtccctaccctaacctcgttagggcctcgtttgccccagcacccccttcttcagccccagctggcaaaagggggtggggcaatcgtgttatttaacatacagcttatagggaagagagctgttgagcattaaagcccccatgcggttgttcatgtataattaggctgtgggagcttggggactgactgactgttagaatcactcgggaccgaagcacttatttaagtaatcattaactggaagatgggaaaggaacagaacatgcaatttgcagatgtcccctcttcttgcaggtcagcctgaaatgaaactcccagcaagtgaggaggctggcgccttgctcagccttcctcttccctctggtgaggggaagggcaggttaggggatgctggggctgagttggggttatggagatggcatctctcaggcacatcagaagcacaagccccccaaaatttccagcttctcatgactccttcgctgacaccgccctttacccagcagcacaaagatatataatgatatattcagttctcagtccggcgcatttgatcaacacctgctctgcactaggccagggacggctccagcaaagtcccagtaatccgttgtcccaggtggaggaggatgttaacaggaagagcccagataattgaaattctggtttagctcatctgtaaatctgcttttgctgcttcccagcagtgctgatgtggtcatgggggatgggacgctgtgttttcctccttcgcgctgaagcagagggtgcctggctgggggtctctaggcaggagcgtgtgggagcggccaagttctggagcagttaaggctgttagtggtgacggggcacctcatggtctctctgggggacaactgcagccccagtggaggaggagggagactggccaactgcatatcccataacaagtgtgggacccggagctcagggagaggagagggaggaagggtgttcggtatgtggtgtgtgtcttggcatatgatgcctcttgctttggaaattctgtgaggttccatcctttttatttattatttattatatcgcgccactgcactccagcctgggtgacagagtgagactccatctcaaaaaaaaaaaaaaaaaaaagaggagctcgagaccagcctgaccaacatggtgaaaccccgtctctactaaaaatacaaaaattagccaggagtggtggcgggcgcctgtaatcccagctactcaggaggctgaggcacgagaatcacttgaacccgggggaggcagaggttgcagtgagccaagattgcaccactgcactccagcctggcagcagagcaagactccatctcaaaaaaagaaaaaaaaaaaaaaaaaaagagcagggaccacgggcagggtatgggttccatgtctggtctgtgatgtgttccctctggatgggcaaacccagaagcttcttcagcccctttcctcctccaggcacaggtcgaggctgggattgcgggaggaggggaatggcactgggatctggagtgcctggttctcaacacttgcttggcagaggggaggaggcccagtgtccccgcgtacagggcagcatggctgcggtttccctcctccatgagccagccagccagacagtgggcaggagagggcgggaagagagaagggcgagtggaaggaaatggagtcgtgtgggcgggtgagcaagttggaaagcgcctggtgtagagaggaacattgttggggagcagagaccactgtggagtgagggagggggccagctgtgcctcttgacacagccagacacctgcccgccagggccagtaaagtgcctggtgtagagaagaaccttgcctggggggcagagaccaccgtggagtgagggagggggccagccgtgcctctgacacagccagacacctgccttccagggccagttaggagagggtacaagctgcggagcccatggggctttgcattttccagggacaaggaagcttggagcgaagcagagattttccgggaggccaacacctcccttttctcccactctgtcagcctggggggctctttattcccattctttagagagagacacggtggagaagatgggaccacagctgtggctgctgggtagaccgaggccaaaccagccccctgctcactttcctgcctctaagcctttgcctgggctgttccctctcctagaatgcctaaccctctagttgaccctgttacggacctggcaaggttagtcttgaataacctgatgagatttccagagctgcttttttccagttcccccactaagaggcttagacctgaagctgagccccactttgggggaagactggaagtttcaggttgaagaccggatcaggaccaggagctcggccagctgacgctgcaaagcctgccttggagagtctgtggcgtaggaaccttacgccttaaccagcgtgggcagctcggaagcaggagccccagttgtttcttggaaaaatggggccgattgccccaaggcagccacgcccttacagagcctcttgcaaatacccacagggtcacccgtctttggtcacagccacggatggcgtccgtcatccatgcctcatctttatcctgtttgtactttaggttggttcagtacttgactgtttacaaagcacttttttttttgagacagagtcttgttccgttgcccaggctggagtgcaatggcacgatctcggctcactgcaacctctgcctcctgggttcaagtgattgtcctgactcagcctcctgagtagctgggactataggcatgggccaccatgctaggctaatttttgtatttttggtagagagggggtttcaccatgttgaccaggctggtcttgaactcctgacctcaggtgatctgcctaccttggcctcccaaagtgctgggattacaggcgtgagccaccgcacccggccttgcaaagcactttcttgaactcttctggttcttgcagaaaagaagaatgatttccccattgcgcagagaagaaaatgaaatactccttttagccagctggtaagacacaaacctgagtcttgagatttcaaatccactgttctttctgttaccccaagaaataattactgagtacaaataattactgagtgtctactactgtatttcattgcttcgaagacactttcttccctctcatttaacaactctgaaatcagggtgcatctcatgagcaatagcacaccgtaatttgtaattggaagcatttttgctttcttagcggagaacaaaataatgtgtaccttccagtggatgtccttttagtttgacgaaatctggtgcgtgcacaactgtggtgtgtgtaaatatggcctctgcctgcaaggtgtgcagtttagaggaaagatcagtcttagctattcgtgtgaaacagaatatgacgcctaccaaaaccaactcgagtgccgtgggaattccagctgaggggcttcagaaaagctttagggaagacgggtgggatttggcctctcagcatcctgtaccatctgcatcaaccagctgatttagacaatacacccaagccctgttagagtgaaggctcaaaacttggcccctggaggctgactatgggtttgcattgcctgtcgttctagatgtttaactctcagcctcagttttctcagtgacagagtggatgtgatgatagtgcttgcctcacaggtaggcgtgaggatcagataaaagaacatattcaggccaggcgcagtggctcacacctgtaatcccagcactctgggaggccgcagcaggtggatcacctgagatcaggagctcaagaccagactgaccaacatggtgaaaccccatctctactaaatacaaaaaataagctgggtgtggtggcgggtgcctgtaatcgcagctacttgggaggctgaggcaggataattgcttgaacctggtaggcggaggttgcagtgagctgagattgtgccattgcactccagcctgggcaataagagtgaaactctgtcacacacacacacacacaaaagagaacgtcccacatctttagtcaagggtctgacagatagagtgagagatcaataaatgtcacccccccgcccccatcctgaaattaattctataaatccagtacacgtagagccggcagacatttgtcgttcgatcactgttgcaatgtcaagcacgttcacatttgtggcctcatttgatcttcggaagtgccggaggatggggatcattactccagtgtcacaaaggaggcaagtgaggcgcgaggcctcacagctggccggtgaccgggctgggattcggaggctggtctgtctgacgctcagtcccatgctctcttcaccggattgcagctgctggagaaaaaccacaagcaaggaaggaaacgcggccgatctggcgggtttgctccagccggggtattttataaatgaatgatcactgctgggcatccttaatagtggggtttctggtttcgagagaagagaggtctcatttagaggctcaggaggctaatttgacggtggggagatgtgcgcagaccgccatctcctctccctgtctccacctccagtggccggtggccagttttgcctctttttttttttttattattatactttaagttttagggtacatgtgcacaacgtgcaggtttgttacatatgtatacacgtgccatgttggtgtgctgcacccattaactcgtcatttagcattaggtatgtctcctaatgctatccctcccccctccccccacccagttttgcctcttaagtactatttgtctcgctggccttcatgcctccttctttgcttggttgcctcccctggccatggagaggatgtcagagtgtggtcacactggtctctgctcatgaccctgccaggggctgtgggccttctccgccagccagattctcctttgtgccctctgaggttaacacagacaaacgcactcaccttcttcctccctcttcctctccttcctccctgcctcgaacctctttcactcagaacacctggctttgctagtaacaggctgtgtgaccttcagcaggccagttaacctctctgagctttagttaccctcccccggtgccccaaaatggatgatcatgagggtcaaatgggaggtggtaggaatgggtcctgggctctgatattgagtcttgctcttctactgtgtaccattagacgcagccctgacttcctttttacctctgtggctttatctccaaaacagagggaataactctctggaagtcctcccgggacccccttccttgcaggagagccattgcccactcctctgtgcgcccaggcagctgtgggctttacccatgctccttgctcttcgttttccggattgtaattatttgcttctatgattgtcatagtcaccagactgaagtcagttcctttcttcagttattcattcagcaagtgtttactgagcatctgtgtgccaggtgctgggattacagatgaaatgggggaaacagctaattaaacgagaagttttaaagctgagagttaaagtggttggatagggcatgtgtaggacgggagtaccaccttgggacagggaggagggtgcagaccaagagggcttcctggaggaggtgacctccaagttaagacctaaaggccaagtaggagtcaagcaaataaagtggagtgggaaggaggagagggaccgagggtgatcttccttggtctccagctccaagccagtgcctggcctggaggagatcagtaagttggttctccatctctcttcttccttgctccttctgaatgccttcctgcaaagaggcaggagcctggatccttggttttctggaccctgggatgctgtggccaagggggttgcagaagtgttctggatatggcatgtccttccagcttggggcacgccacgttcctgaggctggggctgcaggaacgggcatggcagcgtgtgctgggggacactgtgctgaatgattcactggctctgagtaggagtggagatgagccaggccagcagcacgtgcaggagggagctggaaggatgctgaggatgcacgagccttatcctgggtccctttttccaggggaaggagagaagggctcagtaggggacagcgaggctcatgaacttgacaatatcatttctccaagatagtcttttatgtcagaattttgagttggaaggaacattgccaggcctctctgcagctaggggtccctctagcacatggagcttccaaaggaagtgaggtggtgcagttcacatgctagagctatgctcctctcctcctttatgccctgacctccagcgtcattttaagcccccggggatggacctgtgccaaggtcttctctgcctggcctcgattaagctgtgtcttcccccagcccctggagacatttcctggcctctgttctcccttggaagactgtggggttctggagctgaagcaagcacaggatagggctgtgctggagagaggagacgggctttgtgcctggtggcaggctgggcaggagcagggagcgagcacggagccagggctgggaggaaggatcgatgatcatcacaatccccattgacagaggacatttcgtgtctcaccttgctctggacacagcacgtacgtcatgtcctattctacagccactttgcagagtggcttatatttctcccattttatagatatagaaactgaggctcagaggctgagtgaccaacccatgcagcttgtcagcagcagggccacgagttagtagcttgtctgccccacactaggtctggagctgtttctcccacaccacactgccttgttttgagggtttaaaaaattcattcctttccttccaagctggggaccttgctttcctctcaaagctggaacagaaccgagggccctggatgggtatggagcgtgacatgtcattagtgttggaaaaagactgtgagacccaggggatccctgggctgagccggggctggcttctccttccccacagcaccaagtgcctctgggccctgagctcatggtgtgtctcccccagccattcgctatctttaattttttttggtaaaataattacagggcatgagcactgctatctttatttaaaccatgttaattttttttaaaacagagtaacacacacacaaaacaccttggataaaaaaaataaatatctggctgggtgcggtggcttatgcctgtaatcccagcaatttgggaggcctaggcaggtggatcacctgaggttaggagtttgagatcagcctggccaacgtcgcaaaaccccatctctactaaaaatacgaaaattagccgggtatggtggcgggtgcctgtaaccccagccactcggggactgaggcaggagaatctcttgaacccaggaggcagaggttgtagtgtgccgagatcatcccattgcattccagcctgggcaacaagagtgaaactccgtctcaaaaaacaaaacaaaacaaaaaaaatgcttcaggctgttcctcaaagaaaacggttccctatgcctctgcacacccctttccagtcctccaagccaccacttattctttttttttcttttttgagacagagtcctgctgtgtcgcccaggctggagtgcagtggcacagtcttggctcactgcaatgtctgcctcccgggttcaagtgatcctctgcctcactcccccgagtagctgggactacaggcatgcgccaccatacccagctaatttttgtatttttagtagagacgggctttcgccatgttggccaggctggtctcgaactcctgacctcaggtgatccacccgcctcggcctcccaaagtgctgggatgacaggcgggagccgccttgcccggcgcacttactcttttagctctttcttcacacctcttaggtggtgtgaggtgcgtgggaatgcctcgaaagatgcaggcaccggtctctcttttacttgtttttatttttcttgcacagagagggcttcccagttcagagaagggaaaattgaggcccccaccaaggggagcctgctggagtctccaaacacacaagacccggggtctccttcaggcccaacactgtggctggtttcctgtgtcccagtcgtgccttccgtccggccacgcgggccagcagtgttgagaactcactcagggcagggatggaggggggaggcttctcacccctttaccttcctaggccccagtgggcgtccattcatcacctgctggcgtggggcctctcccttggaagggacccccttgcccttatgacgtaagacgtgtggcacctccatcagccctgggttccccagaaaaacgcccgcggcagaggacaggtcaaaggtcagcgctagtcagcgtggactaacagcttcgggcggacacccgagtcctgtagttccttgtttgatctgaaggaagttgtccagcgtcagcagcagccgccgccgtggtggtagcagctgcagtggagctaaaggcagcagggccccgactctcgggacccaggccctggcgggagatggatttcttaaagtaccttttcgtgagtgtccctgggctgtggagggatgcccgtccaggccctgctgcctggagggggtggggaacagagcctctcctgttgtcacctggctgggagccccgagtggctgtttgcctgccacgggtcatggaagccacccttcactcaggggaaggaggaaccgagaccagggacagaggggcctctgggtgggggatgtggagggcaggggacagactcagcacccgggcctttcctccctggcttggagattcgaggtgggtcctggcagagggctggagagaactcacttctgtgttcctctgggaaggcttctcggctccctgccggggcccgagggaacccactgccagccaaaggctgtgcataggtgggagttgccatggcgagagggggagggactcctcagctgggcttccgcctggcctggacgcttggagctggccaggctgcgggtcctgccctctcttctttgggctgtggttctggggactctgtgtcctgtcacggagcctcagagtgtggttagtgtgaggcccagcgaggagagtgtgagccgtggtcctctgctgccaagccacactgtccctgcaggctctgcagacgccccttccagctttggcagaccctttgtgcccgctcctggtgaacatggggggcccacgcggacttggccaggtggggactgtgaggctcttcgtctttcccctgcctgctgccagcccgggactggctgttttcttgcctttcttctccctccttggctgtgtcatctttttctctatgggagtcaagggtgacaattcagggacgagtgtgaggagtgacaggacacttgtttgtggggttggaccaaggagttccccaatctcaggctgcaccgccatgggctccaggatgctgtggggggaccggggaccttgtgaccagccagaaacggcccaacctctctggaccctggcagggtgtgggtagtggtatagtggagagttttaagctgcgaactgatctcacctgattgatgtttcaaaagaccgcgtgggccgggaacggtggctcacgcctgtaatcccagcactttgggaggccgaagcgggtggatcacttgaggtcaggagtctgagaccagcctggccaacgtggtgaaaccccgtctctactaaaaacacaaaaattagctgggcatggtggcacgtgcttgtaatcccagctactcgggaagctgaggcaggagaatcgcttgaacccaggaggtggaagcggaggttgtggtgagctgagattgtgccgttgcactccagcctgggcaacagagcaagactccatctaaaacataaattaaaaataaaatgaaataaaaacaacaaaaacaaaaaaaagaccatgtggctgttctgtggggaactgatttgagagggggttggaaggaggcaggagcccgaggcgctgtccagttgaggcaccgtgagatgagggaggcagtgcaggtaaggagaggtggtgagatgtgggatgccttgtgatggcggacttgccaggaggattggatgtggaggatgagggatcaagacatcagtgatgactcttgggttttttttttttttttgagacagagtttttgctcttgtcgcccaggctggagtgcagtggtgtgatctcggctcaccgcaacctcctcacagcaacctccgcctcccaggttcaagtgattctcctgtgtcagcctctggagtagctgggattacagacatgtgccaccacgcctggctaatttttgtattattagtagagacggggttttaccgtgttggtcaggctggttttgaactcctgacctcaggtgatccacctgcctcggcctcccaaagtgctgggatgacaggcgtgagccactgcatccagccgactctctgggctttgtcctgagtgtcactgagatggcttttgagggaaagaatgaatgagagttcctgttttggcctctaacttgggaagtttgaggtgcctgtcagacatgcacgtgagatgctgagttggcaaaccttgatggatctgaatttgaatcaggattcattctgggcaagttgcttaaccactctaagtctccaaccctccaggcctccctccccgagtacgtgtgaggcgtatggaaagtgcccagttcagtgccttatacctgcctggcacatcaccagtgcccaacagaggataccttgggacttcctacaacattgcttaatatcatctcatcttccagctcaggaacattcagtggcttccatagcttgaaacttgtgtttggggctgaaacttgggggctgatttggctcatagaatgattacgtttggtccacatagagatttttaaaattttgtgtcatccatgtacaaaaattgggagactcacacaaaaaattggatttctggcttattttgaaaacttcagcaacactgagcttgcctttctgctggacagcttagtgagagataagtaaatagtggccgccccctttggaatggccgtgtgctcttcagtgtaccattgtctcagtctcatgctctttttctcttttaaaaaaattggtgaaatttatataacataaaattaatgatcttaaagtgaacaactcagtggcgtttagtacttttgtgatgtcgtacaaccatcacgtctatctaattccaatttttattttattttatttttgagacggagtcttgctctgtcacccaggctggagtgaagtggtgtgatattggctcactgcaacctccgcctcctgagttcaaacgattctcctgccttagcctcctgagtagctgggatgacaggcactcaccacccacgcctagctaatttttgtatttttagtagagatggggtttcaccatgttggtcaggctggtcttgaactcctgacctcaagtgatctgcccgccttggccacccaaagtgctgggattacaggtgtgaaccaccacacctgacctagttccaaaatatttgatcatccccaaataaaacccctttaagcagttactccccactttctcctccccccaagcccctgacaatcacgaatctgttttctgtctttatagatttacccatcctagatattttatagagattgaattattaggcttctgcacagcaaaggaaacaatcaacagggtggaaaggcagcctacagaatgggaggaaatatttgcaaaccatatatcagataaggggtcagtttttaaaatgtataaggaactcctacagctcaataataaaaaagcctcacctgatttaagaagtgcactataggggtgggtacagtgctcacgcctgtaatcccagcactttgggaggctgaagcaggcagatcatctgaggtcaggagttcaagaccaggctggccaacatggtgaaatcctgtctctactaaaaattagctgggtgtggtggcacacgcctgtaatctcagctgcttgggagcctgaggcaggagaattgcttgaacgtggcaggtggatgaggcagtgagctgagatcgtaccagtgcactccagcctgggtgacagagcaagactctgtctccaaaacaaacaaacaaaaaaaaacaaacaaaaaccaaacaaaaacgtgtactaaagacttgaatagacacttctccaaagaagacatacaagtggtcaacaggtatatgagagggtcgttaatcatcagggaaatgcaaataaaaccacagtgatatatcacctcagacctgttaggatggctagtatcaaaaccacagaagaggccaggcatggtggctcacgcctgtaatcccagcactttgggaggccaaggagggcggaccatgaggtcaggagatcgagaccatcctggccaacatggtgaaaccagtctctactaaaatacaaaaaattagccaggtatggtggtgtccgcccctgtaatcccagctactcaggaggctgaggcaggagaatcgcttgaacccaggagtcagaggttgctatgagccgagattgcgccattgcactctagcctggcgacagagcgagactccgtctcaaaacagcaaaaccaaaaaaaaaaaaaaaaaaaaaaccaaaccacaaaagataacaagcattggtgaggatgtggagaaattggaactcttgtaacactgttggtagaaatgtaaattggtgcagccgctatgggaaacagcacggagattgctcaaaaaattaaaaacattaaaaagagaactaccaacttcattctttgcacgtggatatccagcttttttgcagcgccatttgttgaaaagactattctttccctaggattggtcttggcaatcctgtcaaaacacagttggccatagatgtgtgggtttatctctggactcttaattctactctgtcggttcatatgcctgttattgccaggaccacacggttttgatcactgtagctttatagtaagtattgattgggaaatatgagttctccacctttgaccttcctctttaagaaggttttgagtattctggatggaatttccctatcaaatttaggaggagcttttcagtttcttcaaaacatccagctaggattctgatagagatcgcgttagataggtagatcactttgaatggtactgccaccttaacagtattaaatctccaatccatgaacatggaatgtcgttccatttatttatgtcttctttaatgtcattgggcaatgttttgtagtgcttagtgtgccagccactcggttaaatttgttcctaggtattttattctttttaatgctattttattttttattttttgagacggagtcttgctctgccacccaggctggagtgcagtggcactatctcggctcactgcaagctctgtctcccgggttcacgtcattctcctgcctcagtagctgggattacaggcgcccgccaccacgcccggctgattttttttgtatttttagtagagacgaggtttcactgtgttagccaggatggcctcgatctcctgacttcgtgatccacccgcctcggcctcccaaaatgctgggattataggcgtgagccaccgtgcccagcctaatgctattttaaaatggaattgttttcttaattttctgattgtttattgattgtttattttaatttattatttttattatttttattgtttgtcttttctgattgtgtctctccgattgttcattgctggtgtatagaaacacaactgatttttgtactctgcaattttgcagacttcctttatcagctctagtagattttgtgcatgtgtgaaatctgtgaggtttttttgtgttggaacgtctcatctgacaatagagatagttttactgtttcctttccgtggtagataccttttatttctttgttctggctagaacttttagtacacccaatggtagtggtgaaagtgagtttccttgttttgttgctacttcatcttaaggggaaagcttttagtttttcatcactgagtatgatgttagctatgtctttttttttttaatgccttttatgtcaaggaagttcccttttattcttagttttctgagagtttatatcatgaaaggatattagcttttgtcgtgctctttctgtatcaattgagataatcatgtattttttcttcttcatcctgttaatgtgatacattgattttctttttttttctttattttattattattttttttgagacgagttttgctctttcgcccaggctggagtacagtggcacaatctgggctcactgcaacctctttcccctgggtgcaagcgattctcatgcctcaccctcccgagtagctgggattataggcacgtgccaccacgcctgggtaatttgtgtatattttagtagagacgggctttcaccatgtcggccaggctggtcttgaactcctgacctcaggtgatcctcctgcctcagcctcccaaagtgctgggattacaggtgtgagccaccgtgcccggcctattacattgattttcttgtgttgaactgagtttgcattcctaggataaattccacttggtcatggaatataacagtacgctgttggatttggtttattggtacttcgttgaggatgtctgactctatccataaagatactggcctgtagttttctgtggttcctttgtgtcactttgataacgctggcctcataggatgagttaggaagtgtttcctcctcttctatttttggaagagtgtgagaaggactggtgtgaattcttctgtaagtgtttggtcggcttcactatgaagccatctggccctggactgttctttgttgggaggtttttaattactacggattccatctctttacttctcccatcactcgtttaggttgcttgcctcgtgcctgaagtcattggcatcttctagtcctgtcttagaatttaaatatgagtctgcctaatttaagatgtcctataaaaacccaaccatcttcccacccttccccaccttgccacatctctgctctggtatctctgctgagagatggtccctcccacacagcagcagcattcaacatgatgaaccccataggtcagtggttctcacttgggaacttcttagaaacgcacattctctggccaagaatcagaagctctaggggtggggcctaggaaactttttttatttttgagacagagttttgctccttcgcccaggctggcgtgcagtggcgtgatctcggctcactgcaacctccaccccccgggttcaagtgaatctcctgcctcagcctcccaagtagctgggattataggcgcccgccaccacacctggttcatttttgtatttttagtagaaacagggtttctccatgttggtcaggctggtcttgaacgcctgaccccaggtgatccgcccgccttggcctcccaaagtgttgggattacaggcgtgagccaccgtgcccggccggaaactgtgttttaactagcccccaggtggttctgtggcattagcactgccacacttaacagagagccattgcaggctcctggccccagtgacatagtgaaatggcacctctgaaacgctccagcagcaaaggagccgtgagcatcaggagttggtggaaaaaggagaccagagaagggaaagaggagcaagcaggtggcttggcgggggtggtggggggagacttggttggaacaggacctgattctggaggacggttcattattgggagcacccactgggcatagggttggccatccagggtgaggggtgcagtctgtggtcagagcacagacagctgttaatagcagtaacactggcccgtccagccctgactctagccatcccaacaagcccgccctggccactcccaggccaagactcagccctcaccgcttgcttcgttgcatcttgcttagcagaatatttagtcattcatctggcaaatgtttattgagcatctactgtgtgctaggcagttctattaatagcacagggatatggcaaggatcacagcaaacgaagagctctgccctcgaggaccttctgttctgcagccagcctggtggccggctggttctcatcctgcttgccctgtggatggggacttctggaccggtagcggagtcgggcagtgtggcgtgctcggtggtcagacgacatgggacacatcccatcccgctcccagggcgtgccctgtttccccagctttccagaaacgggtttagagaactctccagaaatccttttccttggtcatgtcttccctcttcatccggatgagaaactcactctgacctgtttgcttctccccccagcactttctggcccgcatctccccccgattttcctgggacccacgtaggtgcaaaacacctgctcctccatccttgtcttctggtaatgtttttagtttgctgttgatgtagccttgtcccctccgtgtgtcctggattggggtgggcgggaataacgaggcgattgcaaggactcattgagcgacctgtgtgccaggctctgtacacgctggcccgtgtggtcctgccacagctctgtgagttagcggtcatgttttcagccccatgcaaaggcgcaagcactcagacagcgtggttctgtgaacatgagtgtgtggtgcctcccaggagcagggattttagcgaggctgctgacacataaacacacccccacctccagaagcagaggagaggagcccagggccagggcaggtagctcagcaaggacccagcatgctgcaggtggggccagtgagagtcacttctccagcgagggtcagagaggagagaggcaagagtgttgcaggggcgagggtctcatgagctggggtgcggcaagagggaaggaacaggtggatgcctgtctgcaggagaagctgtgcctgtgtgtagagctgctgtggaccagggggaggcagggagggcacagggtggtgatgagatggagagaaggggtcctggactcgggtgcaacaagagggaaggaagaggtggctgcctgtctgcaggagaagccgtgtccatgtgtagagctgctgtggaccagggggaggcagggagggcacagggtggtgatgagatggagagaaggggtcctggactcgggtgcaacaagagggaaggaacaggtggctgcctgtctgcaggagaagctgtgcctgtgtgtagagctgctgtggaccagggggaggcagggagggcacagggtggtgagatggagagagggggtcctggactcacacgagtgccatcttttcccgtcgcttcttctgctttgccgcctgggcagtgggctggcacccgaaccggcaagtaggggcattgggaaagatccctcaagatttcccaagcctaaattactccttgtggttcttgttcacgtctgcccctgctacctgggacctcctccagcatcctcctccccaaagacttctctgcctttctgaaggaagaccaggctgtttctgtatcgggaggtggtggggacaggggtggaacttggggcccagacggagttcctcagctgagtgctggctctgcgtggttatctattgactggctgtgaacgcagagtccacggggaaatgctggccgcccctctgatttgggtggcaagagctgctgctgctaatacattagacagctgcatggacgctgctattgatgaggagacccaattacatgcctctgtgaaaatccagcggctggcttcctggtggatggagaccccttccggaggctgtcccgggcaggacgttagtctctggggcaatgccagtgagtcagtgagcattaactgagcacctgctgtgtgccctgagcattaaccgagtgcctgctctatgccctgagcattaactgagtgcctgttgtgtgccctgagcattaactgagtgcctgctgtatgccctgagcattaactgagtgcctgctgtatgccctgagcattaactgagtgcctgctgtgtgccctgagcattaactcagtgcctgctgtatgccctgagcattaactcagtgcctgctgtgtgccctgagcattaactgagtgccttctgtgtgccctgagcgttaactgagtgcctgctatgtgcccttggctgtatgcagccatctcagggtgtgtggatgagggtgtgtccgaaaggctgagctgctgttcccggctggcctgagtcacgctgcttctgggtggaaaaggagactcactccctgccaactgtcccattggaaagtgcagcaagtcgctgagaagtggggccggcccagccaaggccatgctgccactggctgatttctgctgctgggcactgtccatgcagggatcatccacccagcacgttgctcatggctgaggctgaatcatagcccttctcaccaactgtgccagccccaggccatggggcatcttcattcagacccatttcttttcttcttcttcttcttcttcttttttttttgagatggagtcttgctctgttgcccaggctggagtgcagtggcacaatcttgcctcactgcaacctccacctcccaggttcaagtgattctcctgcctcagcctcccaagtagctgagatcacaggcctgtgccaccatgcctggctaagttttgtatttttaatagagacagtttcaccatgttggccaggctggtctcaaactcctggccttaggtgatctgcccacctcggcctcccaaaatgttgggattacaggtgtgagccaatgcgcccagccagactcatttctaacagtcttctaaagacactgtctctgggaagaccaatgaaatcgagaaaaagtatcttgaagctgctagcccacctccaacaggacaaagcatgcttccagagggagctttcccatagctccttctaggagctgctatttactgggcattcactgcagaccagaccctggctgggcacttcttacgcctgttctcacctcatctgcctaagagcgctgaagtcaggaactatttgcttcaatttttttttttttttttttttttgagacagagtcttgctctgtcacccaggctgaagggcaatggtgtgatctcagctcactgcaacctctgcctccaaggctcaagcaattctcctgcctcagcctcccaaatagctgggattacaggtgcccgccaccatgcccagctaatttttgtatttttagtagagatggggtttcatcatgttggccaggctggtcttgaactcctgacctcaagtgatccacccacctcagcctccctaagtgctgggattataggcgtgagccaccgcgcccggcctgcttcaattttcaggtgaggaacttaaaagaggaatgaagagaggttaacatgcctcatgcaacacagctgggcagtagcaggttgcccactccccagacctgggcttcgaccaccgggctctgctgcctcctgtgtgtttctgctgcacctaaacctaaatcactctgcatgaccttgcagccgaagcctgagttctggggttcagcatctctcaggcccaggccccagctttgctctcccatctgatcttcaggatgtctgacccagaggcctccagccagccgggctgatccactaacgcttcactgactgtgtgccgagctgcttctcttttctgtctttgcccattcagttcctgctgcccgagtgccacagtctcctcacccctctctatccagtgatttctcttgatcctttaaggtctgtctgggatcttgtgtcttgcaaaaagccttcgttgacattttggttttaagatgtgtccatgaattctttgatgcttctctcttcaagaggtcgaacttgttgtgtgcggtggctcacacctgtaatcccagcactttgggaggctgaggcgggaggatcgcttgagctcaggagttcaaaaccagcctgggcaacatgatgaaaccctgtttctactaaaaatacaaaaattggctgggtgtggtggcagtgcttgtagtccctgctacttgggaggctggggtgggaggatcgcttgaggccaggagatcgagactgcagtgagctgtgatcatgccactgcacttcagcctgggtgacagaatgagaccctgtctcaaaaacaaacgaaaataaaaagacgtgaaacctaggctgggcgcagtggctcacgcctgtaatcccagcacttggggaggccgaggcaggcggatcatttgaggtcaggagttcaagaccagcctggccaacatggtaaaaccctgtctctactaaaaatacaaagattaactgggtttggtggtgggcgcctgtagtcccaggtacttgggaggctgaggcaggagaatcgcttgaacccaggaggcggaggttgcagtgagccaagattgcgccactgcactccagcctgggcgatagagtgagactgtgtctcagaaaaaataaaataaaataaaataaatactgaaaagcacaaagggaaaaatcatctgtaccttcagcctcattttgttgtgtatcctttgggatatttttctccgtgggggtgatgcatgccctcagatgcagtcctgtgtctctctatacaaacacattctttatgtttcatggaaacaatgggatcatcttgttcaaaactctatttttctcacttagcaatgcactgtgaatctttgcagtagcatcatgagcacagacctcctcttgtcgtttattgtatgagtgtacccctgtgccttatttacttttcctttcacggttgggtacttcccccattgcttagactttttggcccttaaacagtgctgggacaaacatccttgtacatgtgttcttgtggcatggcccggatattgttctagggtaaattccttagagtgggtttcctggaccaaaggacgtggatattttaaacggtttggatacatggtgcctttcggaaagctgtatcaggtgtgcactcagcagagttcctgcagcccggggcctgcagactggacacagtggctgtactgtttctcattcctgccagctatatgttcctgccacatatccttgccaacactggttgatctgatagtgaaagatgttatcttactgtgatcttaatttctttcataactagagaggttgggtttgtttccatgtgttcattggttattttatgtgtgtcctttaatcatttgttcatgtcctttgcacatttttctgttttttttttcttttgagacagtctcactttgtcgctcaggctggagtgcagtggtgggatctcagctcactgcagcctccacctcttgggttcaagtgattctcatgcctcagccttccgagtagctgggattacaggtgtgcgccaccacacccagctaatttttgttatttttagtagagacagggtttcactatgttggccaggctggtctcgaactcctgggctcatgtggtctgcccgcctcagcctcctaaagtgctgggattacaggtgtgagccaccactgcaccagacccctcatttattgatataatggcttttggatagtttgaggtatggtcttccagatcattttctatgaatttatatgcatacattatatacagtatctttttttttttaagagatggagcctcactgtgtcacccagggtagggtacagtgtcatgatcatagctcactgcagccttgaactcctgggctctagcaaccctccttgcctcagcctcctgtgtagctaggattacaggtgtgaaccaccgtgtctggctgtttttataaaattgagattatattcaatgtattgtctctgatttcctccacccctcaacttaatatatcttggagagtgtcatatgtaagcaacatgaatctgttgctgtctttttgaatgattgtatagtttttttgaacagctttattgagatataatttacgtatcataaagtcacccatttaaagtgtacaatttggccgggtacgatggctcacgcttgtcatcccagcacttcgggaggccaaggtgggcagatcacctgaggtcaggagttcaagaccagcctggccaacatggtgaaaccctgtctctaccaaaaatacaaaaattagctgggcatgggggcgcatgcctgtaatcccagctactccggaggctgaggcaggagaatcgcttgaacccaggaggtggaagttgcagtgagctgacatcgcgccattgcactccagcctgggtgaaaagagcgaaactccatttcaaaaaataaaaaataaaataaagtgtacaattcagtggtttttggtggtattcacggagctgtgtaaccaccatcataatcagttttagaacctttttattgctttgaaacgaaatccgtaccttttagctatcaccttccaatcccccatccccctcagcttaagcaagcgctcatcttctttctgtctctatgaggttgcatactctggacatttgattaaaatggaattatggtcctttatctctgacttttgtcttttttaaattttttttgagatggagtctcactttgtcatccaggctggagtgcagtagcgcgatcttggctcactgcaggctccgcctcccgggttcacgccattctcctgcctcagcctcctgagtagctgggattacaggcgcccgccaccatgcccagctaattttttgtatttttagtagagacggggtttcaccgtgttagccaggatggtctcgatctcctgacctcgtgatccgcccgcctcggcctcccaaagtgctgggattacaggcttgagccaccacgcctggccttatgtaagagtttttgtgtggacgtgtattttccattctcttgtgtaggtgtctaggagtggcactgctgggtcatgcgggtacagaggcaggttcttaactgcttttctatacctcctcctgtagtgagggaatttgtcatccatttggttcacatatcagtacttatttatttatttatttatttatttattttacttatttactgagaggcagtcttgctctgttgcccaggctggagtgcaatggtgcgatctctgctcactgcaacctctgcctcccaggttcaagcgattctcctgcctcagcctcccaagtagctcagattacaggtacccgccgccaagcccagctaatttttgtatttttagtagagacggggtttcaccatgttggctaggctggtcttgaactcctgacctcgtgatccgcctgcctcagcctctcagagtgctgggattacaggtgtgagccaccgtacccggccctatctctaccttttttcatttggtgtaatgcactcaagggtcagcagtgttgtggcaggtatcagtatatgttatttttattggctgaatattattccatcgtatggatacagcacattttgtttattcgtcagttgatggacatttgggttgtacccaccgtttggcaagagtgaatactgcagtagtgaatgtttgtgtacaagtatttgcttgagtacctgctttcaattcttttgtgtatattcctgggggtcgaattgctgagttgtgtggtcataattccgtgttgaacatttccgggaattgccaaatgattttccacaatggctgtactgtttgacattcctaccagcaatagatgagggatctgatttctccacagccttgctcacgcctgtgatagtctgtgttttgatcgtggctatgttagtggtatgagtggtgtctcattgtggttttgatttgcatttcctgatgactaatggcttgagtgtcttttcatgtacttattgttcctttgtatgtcttctttgggtatatgtgtatttagatcctttgcccgtttttaaattgagctgtctttttctgactgagttgtaagagtttgtttttgtagagacacgtcctttatcagatatacaatttgcaaatatttcctagcattctgcgggctttcttttgactttcttgagagtaagtatgaggaattcgtattaacttttctttaaacgtttggtagaatttacaaatgaagccacctgggtctgggctttccttcgtgcgtcgtttttttgatcattaatttgatctttttatttgttatatgtctttagattttctatttcttactgagtcagttgtgataggttatgtttttcagggaatttgttcattttatcgaagttatctaatttattgacctatagtttatagtacttgtattttattctgtgagtgtagcttcttttaaccaattttctgcagacttttaagttgtttttatttttttactgttagaaacgatgctgcagtgaacatttgagcctgtctgtctttgtgcacattgcaagtgtgttagaggatggattgttagacgtggaatcgcgtgtcagaggtccgtgtatttaacatgttgattgcttctgttgcattatcctcctcctgttcatctttctatccgtattgattggtataagctctttacgtctgctaatcctggtctcctaagcctggagatggtaagaatgccccgcgtgggtggtgcatgtgcacctgagcaagttggaagaggaggtttggcatctggatgtttggcggctcacttctggtcaagggagttgggcgcgggtgccctaagcccacccctgtacattcacacgtggggtttctagatgccagatcctgaactgctggtaggtcggagctttttgcctctgacacgctggctttggcctgacagaggttgtctggagtcaacagcagggctgggtctctccagggacttcaccaggctccttcccagggcgggtctgggaattctgggagcagtgggagctccaggcagttctggcccatgggtgcctgcagaggtaggaagagtgcttggaggccccacctctgcctgaagaagaaccgaggacactgttcctcatccctgctttcttttctctcgtcttcactggggactgtctgttctgggcactcatgacctcccggcttcgcggtgcccagatgtgggcagtgacattagtctgaggaggagtagctgttttcaggggataggaagtggggtggcctctgtgtgttttgttggggtagagttgccagcccctcacgcttccattccgcttcccttttctcctttttgtttttcctggatacacaagggtggcaccaaagtaggtcaaaggtttggacaagtgcaattgggattttaaaaataacccatctaggctgggcgtggtagctcacgcctgtaatcccagcactttgggaggccaaggcgggaggatcacaaggtcaggagttcgagaccatcctggccaacatagtgaaaccccgtctctactaaaaatacaaaaaattagccgggcacgatggcgggcgcctgtagttccagctactcgggaggctgaggcaggagaatggcgtgaacccgggaggcggaggttgcagtgagccgagattgcgccactgcactccagcctgggtgacagagcgagactctgtctcaaaaaaaaaaaaaaagaaaaaaaaaatccctctaggcccctggaggcctcggttcaatggtgttcaggctttgcttcaccagctttagggtgccagagtggtgccttgtgggcaggggaccgggcaggcagaggcagaggtggcatagcgggccctccccctccttccctggctgctgtggccacagcgaccctgctttcaccggttggttttctgtatcagggtgtggaacgccgcttgtgttggacaccttggccccactgttgggttgaaaacatcctaaatatggctcctgccggaggctgaatgccgaggacgataggcgtttgcagaatttggctcttcccaggggccggcaggcccctttccttgacagaggctgagtgtctgctcccccagcaccattcatttgccagcccaggtgtgccttagcctctctcctgttgtatggggtgtttggccctctagccctgcaaaggcaaaatcaaattatcttctctgttgatccaaatgaattttgtccctggggaagccccaggctcagcttcctgatagttggtgaggaagaggcttttgctgtggacctcccggctgatccctgtctttctgtccccctgcttttgtctttcagtcgtcggagttctttgagatgctggagaaaatgcaggtgagtacgtacccccaccgtggcggggaagaagcccagccccagatgtgggtggcatagggaccaggcagaacccacgggcagaagccgggtgccctggacgggggtgcagagaagagacaattgcatccccttggcccagacaacctgaggccattttgctgttgaggggtacggagcactttgggaagactcctgcggagggacagggaggataaaagcagaacttccccagcagggcagctggggaggccataagccctgtggatgtggaggagggtttgaagggtccattgttcctagcacgagctggaaagaaggcctgaaagaactagctgcttcttggaggagtcatcttgcatagggaggcagaggggtggggtgggaggctggcttgtgttcaagtcctgcaccagacacttactagcaccagttcctttcctgtgctaagcctccataaataaataagaatgaatgcacccacttacatggtggttggggtgaaatgagataatcggtgtaaatacttggtagacactacataaaagttggtgtgtgatgtgggtttgggggttcttcgttgttcctcaccagggtcagggctcccaggtaagagctgctgccctggggagtatgtgcagaggcccggcagggttcattgacgtgggcgggaagactgggaagacaatgctgataatacacctgtagctcaagcacttcactgggctcagagattgacaggcgtcatttcttcctgctaaggccttcagaagtaggcatattattattattattatccccataggacaggtgagaaaatcgaggcacagaacaattaaaggcagcactcaaagggtgcgtggctcataagtagcttcagagccagagagtccagccattatgtcatgatgctttttaccataagtaggtgctccaggctcaagggaggaagattctgcaataatggtctggaagtcctaggaggaggggcaaatacagcacccacggcagtcctgagatgtgggccaagcagccaggtgtccctgagggtggggagggaggggagacgctgtttgaagggaaagtattgttactgccgtgtcaccgagagccagttattaaaattgtcctctgcgcccagcagcgtgtagatgacagactcatcttctacgcatttagggaacttatcatcagcttgcggaaaccaggctggcatgtgcctcacagtgaggggtgggagatggtatataatcaagtgctccattgcttggagcaaagctgggattttcgcctctagtcagtgggatcctggcactctgggaagctggcagggggtttgcagcccacccagccttctctccggttgctcctcagatcctctcttccttctcccccagctggagtccccttcccacaactttgccccacacagggtctctctgagcacagcattcagccccagttaaccagcctcagagtgttgtgttgtgtagaggctgcagggcttgtctgttcatgtagatcgggtgctttctagggtaggggtcttgttttattctccctctgtctgtgcaatggctgatccccctgggtagcgtgcctgttccctttcagttgagactgttgaagccaaatttctgggtgtttaagtccctaccatgtgccccctgggcccagcctcagagggttcactcttagtaagaagctcacgtatggggcactgctggccatggagtgcccgcgtgggccttgagcctgggctccatctctcttcatcttgcacgtgtggaaactgaagctcagagcagtgaagcgcccgggtcacttagctagttgtgaagagctgaaactggaatccgggattcccgatacctagcccaagagtctgggaactgggagaaggcagaagctttggattccttcagtcctgggttcaggttctaaccctgacgctttctagctgagtatcttcagtcaagtcggtttccccttctgagccttaatttcttcactgaggggagaaggggaaataaagataatacccattgtggccagttgcggtgtctcacacctgtcatcccagcacttgggaggtcgaggcaggtggatcgcctgaggtcaggagttcgagaccagcctggccaacctggtgaaaccctgtctctactaaaaatagaaaaattagctgggtgtggtggcacacgcctgtaatcccagctacttgggaggctgaggcaggggaatctcttgaacccgggaggtggaggctgcagtgagccgagattgcgccactgcattcagcctggatggcagagcaagactccatctcaaaaaaaaaaaaaaaaaacaacaaaaaaagacaatacctctagcaaaatagcacatggaggagagagggccccgtgctgggcagtggctctgcggtaggttattaggggagggagtggcgtggggaggggatgggaggaagtttgctctcctgccctcggggctgttcccagacagggatgactaatgcaggccaaacaaaacagactcctgccctcactgcccccacccgccatctgcccagtttgccagctgggacagggtctgtagggccacccaggtggctttgtgtgtgtgtgaggggagcgcctgttcagtgggaacggccctcccacgccctcctgaacaatgctgcaaggcgactcagcccagggaagtccgcagaggctgcatgtcaatccacccagttaacaggagccctgctgtccacagagtgtggggtacgtcacgcgcttggtgagccggtgacccggcttcaaatctaggccctgccactcactggctgtgtgaccttaggcaagcagcctccttctggggccccagtgtcctcgctggtggaaagtgctgtgagtttcaaaggaggccacagagagagctagcttgggaaggtcaaaatccctgtgcattagtgttgtgaccaggcagacgctgcttctggactccttctgcttcagaggggacctgtttcttctagtttgtgtaccgtctcatactgtcacccgattttctcagatagtcttggaaacaccacgtgttcccctcctgcacaacacggttaagtcagaactcagtgatagaactgctggaccagggccaggcgcagtggctcacgcctgtaatcccagcactttgggaggctgaggcgggtggatcacctgaggttgggagttcaagaccagcctgggcaacatggtgaaaccccatctctactaaaaatgcaaaaaactagctgggcatggtggcacatgcctgtaatcccagttacttgggaggctgaggcaggagaatcacttgaacgcgggaggtggaggttgcagtgaaccgagatcccaccactgcactccagcctgggcaacaagaatgaaactccatctcaaaaaaaaaagaagaggctgggtgcagtggctcacgcctataatcccagcactttgggaagccaaggcgggtggatcacctgaggtcaggagttcgagaccagcctggccaacatggtgaaacctcgtctctactaaaaatacaaacattagctgggcgtggtggtacatgcctgtaatctcagctactcgggaggccgaggcaggagaattgcttgaacctgggaggtggaggttgcagtaagccgagatcataccactgcactccagcctgggcaatagagagagactccgtctcaaaaacaaaaacaaacaaacaaacaaaactgttggacagggcactgctccccagaagtgaattcttcagatacctgtagataaactcccttagtccagtcccaggcatcatatctgatccttgcagtcatccttccattagtgagatgaaaggtgagcgtctaatcctcattttacagatgacactgggggctccaagaagctacgctttgtcaagggtcacaaatagtaagttcgcagcagaatgagggccagcaccaggcctcctgcctgtcccttgaaggcctgttggcgtgggctctagagcgctggctccgacaccaacaggcatgacttcctatgtttcccttcccttactggctctgtgaccctaaggattttttttttttttttttttttttaatttgagacggagtttcgctcttgttgcccaggctgaagtgcaatggcgcgatctcggctcactgcaacctctgcctcccgggttcaagcaattctaccgcctcagcctcctgagtagctgggattacaggcatgcgccaccacgcccagctaattttgtatttttagtagagacagggtttctccatgttggtcaggctggtcctgagctcctgacctcaggtaatctgcccgtcttggcctcccaaagtgctgcgattacaggcgtgagccactgtgtccgacaagacagctatttaagctttgaatgataataccgcctccttcatgatgataatgacccacagcatttattatataccagtcagtgttccaagtgctcaacccattgttaacctttaaccttcaccaccatagtcgatgccatcatcattcccattttacagatgagaacattgagtcacagagaggtttctgtgacttgccaaggtcatcaggctgataggtggcagtgttgggatttgaaccccggcgatctggctcaagtctatgctgttagcccagcggcgctgttgcctcacctgaggctgctgtgaggcccgcccctggccaggtgtgatgtgtgcaggcccagcacgggccagcttttgctgctgctcctgttactaaccccctgtaaggccaggtgctctttatctggccctgtcttctgacctttgcttttctgtggatcctgttttccttgtttctataggggatcaagcttgaagagcagaagccgggaccccagaagaacaaggtgggctgggtgggtgagggggtggccagacggccctggtgaggggctagggcgagaggaaggcaggaggggctgccgggatgctggggtcttctgtctcacacctgtctaactctgactcgcaccacgggccgcttcacgactgccttgttagaccagtgcacggtgggcagcagaggggtcctggcttgatgccttaggacagcttcagagcaggctgggggtggaggcctcggtgggacctcaggcttggccgtttggcccggctcttccctaccctgtgcagtgtgtaagggtgtcaggctctgtgccccgggttccagtgggcagtcagctctcagcttcccaacccaggggtgccgcttatcacttggaggtcagtccgcctgcctggaaaggggtgctgggggagactaggggtcattttccggaatgagcgttctaggatgagaagctggtatcacgaggggtgagaagttcagcaccttcggacactgcatcatcagctggcagggtttatgtttgggttctgtcagtttggagaagaacatgggggatgttagattccagagctgattctgagctgttcttccatcgaatgttcctccctcaaagcccccccacaacatatcccccttgcaagacctggaaacagtggtcagactttacgggcactgccgggactaacggtggcatcatctggtttgtcttgcaggacgactatatcccataccccagcatcgacgaggtaggtgccctcccctcactcccacctgccctgcagcctgctctgggtcccgtccctggggaaatgatggcgatggcctgtgcccagccccccaggggagagaaccttgggcctgggacctctcttcctgtctttgcctttgtaacctcagcttctccatgtgttaagttgggggtgctcatctaggcctttcagccctggggctacagggttggcgaatgaagctggaggtgttgtggggcttggaggaggggttcatgtcactgcctttggcctcaagtaccagtgggtaccaggccccactcctgggagcagcgcagaggggacaccgccaccggccccctccctcccctgcggtcccaggggagcgcacgaccctccctctgccttcaggttgtggagaagggaggcccgtaccctcaggtcatcctgccacagtttgggggctattggatcgaggacccggagaacgtgggcaccccaacatcgctggggagcagcatctgtgaggaggaggaagaggacaacctcagccccaacacatttggctacaagctcgagtgcaagggtgaagccagggcctaccggaggcacttcctggggaaggtgaggctgggggagaggagctgctgggggttgggggcagaggctggggacgctgggagagaggaggtaccaggcggtaggggatggggagaggttgagggaggctgtgggaggctgtgggagaggagctgccaggggtgggggtgaggctgggagaggctgtgggagaggagctgccggggatgggggtgaggctgggggaggctgtgggagaggagctgcggggggtgggggtgaggctgggggaggcttgggggacagaggagctggcgggggtggggggaggggctgggggccctgggggagaggagctggcgggggtgggggtagggcagagtgccccccttttccttggcctcttacctccttcctagtctgtccttttgttgctgcctgctgctgtcttagttggagaggtctgagggcctctgtcctgggataggggacggggcaggggagccatgtaacaatcagggaggcccagtgccatgagtccttgtggggaccaccccccgcaaatgtttcgggaggcgatggaatgggtagtgtttggggtgaaggacggtggctggagttttgactgttcgaggaaaaatgtgttctcacacctcaagaagtctctgtttccatctaaatcacgcaaatctctccgtcctcattcaggcagatcctctgagtgcttgtactgcatagtgtctgcgagcctctgattgcttaaaagtgacaaagttaaatttaaaagaatagattctgcccttcagatttaccaggttcttgatgtactgagggcagattccggaaatctgtagcctgaggccgctttgcagagtctcacgtgacgggaggctgcctcagagcccctgggtcttgttagcatgcagattccagggcctcagtctgatccagcaggtctggggagctgtgtttttcgcccgtgttccccgagccagggagtgacccactggctcaggacacctcccagctcccctgggtggaggtgccagggttcctccttgctgtcttgccccagatagtgtgaactggtgagggccgccccatgggaatgagaatgtggactcggtatcttgtggttaagaacttgcccttcagagtcaagacagctgtgcgtttgaaccctggatctgtcccttactcatcgtgtcatcctgggcagtgacttaaccccccgaccattggttttcccatctgtgaaatggggatgatgttctctcccggatacagctgtggtcaggactgaaggagatagtgggtattaagcccctggcacggtgcctggcgcctcctgaggatccggccgtcggtacctgttaatgtcgttgtcattgtcatcagtagcatccttctcttccttgttgctgtggggcttctcctggtgaaggaggtggtttagggggaacatacctggaaggtttcttcctccttcctgctcacactcagtttctttttttaggatcatctaaacttttactgtaccggcagcagcctggggaacttgatcctgtccgtcaagtgcgaggaagcagaggggatcgagtacctccgggtcatccttaggtagggctgttgcgctgcttgaggccacttctcttccaggcagggctctcatcggtggtgtgggggctgggatgggactcagaaataccagactgaccagtctggtctgggtgcactggctgacggggacaggcctgctggaatcctggggctgtgtctgaagttgcctagcagggagacccacgcgctccaccagttagctgacagtcagaggggcatccaggtctcaaggtcacccagactgtaccccttcctgcccctctttcttacaagtccatggctctgaggaagacgggaagaaaagtagggatggttcagtgtgactcatcctgctgagacacagctccgagtcctgggagagggttcgccagagtgctgcctgtggtatacatcttgccaggaaagatagtgccctgtgtgtttgttgtatgggctgggttccctgagatgcactgatgttcacaacaggagcactgatttatagcggaagccagggcacctctctctggattgtgaccttctcaagggcaggagctggaactggtttctgtttggtttagctaacatgttttgtaaaacctcctctgtaccaggaactgcgataggtgttagagataccatgatggctgagacttggtccctgttctctgaaaggcatatggtttcatgaatttaatgtgtgtcacgggtatgattttagcaatatgcacaggttgctatgggggcacgaaggaatctgtgtcttatttatctctgtccctggttgggtggtgcttagcagaatgctgtgaacctgtcaggctctcaatccttatttgtggagtctaattgaagattcataaaggtatttggaaaagagcaatcacatttttttttcctgcccaaattttgagataaatattggagggaataaggacatataaccccactttgggaaaggtgggggtccgtggtttcaggatgtcgtcagcacccatccaatcttagtttgtttcttatcaagaaaggaagcaattttctctacagaggttcacttggctggaaatcatatttgcaaggcatagaagagtcaattaaatagcaagagccaattttctgagaggttaatacctggatctccatctccaaataggatttccagctaggtgaacctctgtgaagaaaattgctaccttaataaaaatcagaccgagactgggtagcatttttgaataagatgacaatggaatacaaagatctaaccccctttttctaatactgtatcctccattaggactggaaatgctgcttcggggctgaaagctaagaaaaatgccgggcacgcaacacgcactttgatggttttttgtttttgttttgtaatctatgggggcagttaggactaaaagtaggtgaatattgagagttgaaccccagattctcttccttagaaagcagtgttgtggccaggcacggtggctcacgcctgtaatcccaggactttgggaggtcaaggcgggtggatcacgaggtcaggagatcgagaccatcctggctaacacggtgaaaccccgtctctactaaaaatacaaaaaaaaattagctgggcgtggtggcgggtgcctgtagtcccagctactcaggaggctgaggcaggagaatcacctgaacccaggaagcagaggttgcagtgagcaaggatcgcaccactgcactccagcctgggcgacagagtgagactctgtctcaacaacaacaacgatgacaacaacaacgacgacaacaacaaaaagcaatgtcgtatgggaatatatgaagttggagatctagaagaatcctgtcctctttaggagtgagagtgagccctggaatagacagggatctttccacatagaattatttttgttgttgtgggtcaacagcattgaaatcaatgccccaggaagcccagcaagctcaaatgtggctctcccagatggaaagctagtaggtagggtggtgacgagaagccgtaccccagctcggaagttgggcagtcacatcatgtacttggagtgattgccaggccaaattggaaaccagacataagaaattggctccacggtttagcagctttgccagacacaaagaagaaattatccagagatgaaattcccctgctggcggtgactactgtccaaacttcttcctcattccccataggcttctggattttttaacggatgtcccaaatttataacaagcagctctccagtctaagatctaagtattctaacagcctgtgtgtgccatgagagtagccaagaagaatctacccacagtttggagacaatgagcctgtgtagatttcttctgtttcaagtttggatataaagaagaagaagttttatgggtttgtaaaagaagagattctgcctctaaaaaagcataaactagttagagaataacagagttttgaaaagtatttacttttacagaaagccaggtgaatttgagagatttattaactttgaattttccacaaacctctagaaaaaatacacactaagaaagaaaagatagagtgagccaacagaatgggaggaaacagttgctggttaagttagggagataataaaataaaaatggacaaaaagaattttaaatagtatatgaaacagtacaaagcagaatctactttgtagaaaatccagttattaatatggggaacaagcttaagaaactctcacataattcaaaggaaacacaactttaaaatgatgagtgagatgatgatgaatatggagggtagtgagcaggaattacacatatggataattgatgttgtcaagctgattgaagacttaaatctgaaaatcaaaatgactcacccattaacagacaaaatcaatgaaaggaaactaattgctggatgtactttgatgaaaatttagtatttcatagatataaagttactagtagtagaatggaagcattccaaatagtaagagaagacaaagaaaacacactttgtctgtagaaaaagaaaacaaaggaataataaagaaatatgatagaagtgtgcgtacatatgtgatgataataaatataaatgacttaaattcgattgttaacaaagattctcgatttgggtcatctctccaaaaaacctacacaaattgatctatattttattaaagaaagtaactcagaatatttgaaaattgttaagaaaaaaattagaaaagtcaaatacaaaaagaaagcgggattggcaatattaatatagaaaagtagaattcaaggcaaaaaagcaatcagtgtgataaagagggctattatccatcttttcataaaaggtaaaatcaataatgatattttatattgtcagtagtatatattatagtatatgtatatgtacacatgtatgtaatgattatggaaaaattcacagaatacaattgtaatggtagatttttaacacacatcacttgacatatcaatactagggttagaaatgacatttattcatctcaatatcaattatatacatatttttctttatctatctatctatctatatatatatatatctgtttctgtatctaactatcagactttgatcctctaacagattttacttcttttcaattgcctttggaatatttacacaaattgattgcatagtagatcagtggttttctgtggacctgctacatcagaatcattttggatctttaaaacaaagtaaaacaaagcaaaaacaaacaaaaaagcccaacaaacaaaaaccaaaacctagacttctaggctccaacccaaccatttgaaacacacacacacacacaataaataaataaataagatatgtaaagatgtgtaaatatatatattctttttttttttttttttttttttgagatggagtcttgctctgttgcccaggttggagtgcagtggtgcaatcttggtttattgcaacctgcaactcccaggttcaagcaattgtcctgcctcagcctcccaagtagctgggactacaggctcatgccaccacacctggctaatttttttgtattttcagtagagatggggtttcgctgtgttggccaggcttgtcccgaactcctgacctcaggtgatctgccctcctctgcctcccaaagtgctgggattacaggcgtgagtcaccgcgtctggcctaaatatatatattcttatttccttccttatttccacaggattctgtagaattctgtaacttgcttctcttaacaatgtatcttagagatttttccgtattagcatatagagaatgtcttaatttattttactgctggatggtattccattgcatggatgtgaaataatttatttaatacatcccctgggccgggcatcgtggttcacgcctgtaatctcagcactttgggaggccaaagcagatggctcacctgaggtcaggagtttaagaccagcctggctaacatggcaaaaccctgtctctactaaaaatacaaaaattagccgggcgtggtgacatgcacctgtaaccctagctactcgggaggctgaggcaggagaatcacttgaacccgggatgcgcaggttgcagtgagccgatttggcgccactgcacttcggcctgggcgacagagtgagactctgtctcaaaaaaaaaaaaaaaaaaaaaaataataataatacgtcccttgttaatgaccattgccaatattttggtaacacaataatgattaaatgaataaccttgtgcagactcagtttttatggattatgatagtttctcagatgagatagctaggttaaaacataaatgcatttgtattttgatagataacgttaaattgccctctgtaggggctgtgtaaattccaactttcaccagtaatgtatcaaagtgcttcttattccaaagcctcttcagtagaatgtattgtcaaacacttggatttttgcccgtctgatagatgagaatagtatttagtgttgtttaaatttataatcttaatatgaatcatgttggacatctcttcatatatttaagaactgcctctatttatttgctatgaacagtttataagctttgcttctttttaaattgggctgttatttaagattctattttttaaaatcttggctaggcacagtggctcatgcctataatcctagcactttgggaggctgaggcgggaggatcacttgagcccaggagttcaagaccagcctgggcaacacagggtgaccccatctcttaaaaaaaaaattagctgggtgaagtggcacacacctgtggtcccagctactcaggaggctgaggcaggaggattgcttgagcctgggaggtcgaggctacaatgagccatgattgtgccactgcactacagcctgggtgacagaacaagaccctgtttttaaataaataaactaaatcaatcaatccatcaatcagtcgacctatgtaactaacttacttgtaggtaattatcgatagcagctataattaggaacttctgaaccacaaagtaaaactaaatacatttcagagagcaagctctctgctggatgtattcacttacaatttgatgataaaactagcaattaataacaaaataatgatttaaaaaaaccactaaaccactgagaagtaaacaatcccaatactttcttaagtagcttttaggccaaagggaatagaagctgcagttacagaatatttataaagtaatgacatttataatactatacataaaacctatgggttgtattcaaagcaatacttagaaaaaaatttattaccttaaatggtttcctattaaataagaaaaagaactggcaggtgtgttggctcatgcctgtaatcccagcgttttgggcggctgaggcaggagggtcacttgagcccaggagttcgagaccagcctgaacaatagaatggacctcatctttacaaaaataaaaataataataatacagtaaaataaaaataagagtgatatttgcaagttgttattattgttagcaacttctctgtgtctcattttcctcatctgtgaaatgatgatggtagcatgtaccttgaaattattgagtgcttacatgtcctggtgagtgaggaccttacatgctgcagctgctcagtaatggtggctattattattatcaatattgttacctaaagaaagccagaggaaggaattcacaaagattaaagcagaaataaataaactagaaataaaaataatttgagacttgataaacctaggtttcttttggaagaagcaataagataggtaactagctagtcgaatatagatgagaagagaaaataagaatatacaaaattagtcataaaaagatgcatgaccacagatgtgaagaagattaaatgattactaatggatgctgtgttcaactcatgctattaaattgcttctgtttctaattttatttgaaattttatttgaaacagatgcctttctaggaaagtatgccaaatgtaacttaagatgaggtaaaaaagaaacctgaacaaaccggtaactgtggaagaaattgaaaaagttctcaaagaattatctcttcaaatgtttctagatctagatggtcttgcaggaaggtgttttaaactttaaaggagcagattttatgttatttaaactgttcaagagaaaagaaaaaaaaatatggaaagcttcccaattaataatgcttaaaagagctttatgggctgggcacggtggctcacgcctgtaatcccagcactttgggaggccaaggcgagtggatcacctgaggtcaggagttcacgaccaacatgagtgaaacctgaaatgagcctggccaacatggtgaaaccctgtctctactaataatacaaaaaaattagctgggcgtggtggtgcacacctgtaattgcagtgagccgagcttgtgccattgcactacagcctgggtgacaagagtgaaagtccttctcaaaaaaaaaaaaaaaaaaaaaggatctttttgaataaaatcagtcaaatgagatgcaaaaaaagggtaggggccaatattccttacgaatgtagaaatcaatgttgtaaataaaatagcagccccagaaactcaaatctaaatagactaataagagtaattcactatagccaagaaagagttattttaccaatgcaggatggttaatattaggaaattcattcagtgtttgtttacccaaggcttaatatatgccggactttgtctggttgtagagatactgtgaggaatgagttcttgctacttgcccatagaaggcattcagtccaaatgcactgcgttttagagattcttgtttctgttctcggtcttactcatcatcttcttcttagggacagggatcattataggctagtgaggctgatgggagacgtaggtggtgagggagaactgaaggcaatgtggagggtgtgtctgagtgtgtgtagggttgataaatgatgctagagaagtaagaaaaggctagatcctgtaccagtgatgtttaggagctcagattttatcctaagagtcataggagaggtactgaagggagaaggtcatgatcagatttgcacagtagaatgatcactctggcgccgggcgtggtggctcactcctgtaatcccagcactttgggtggccaaggcaggtggatcacctgaggtcaggagttcgagaccaggctggccaatgtggcgaaaccctgtctctactaaaaatacaaaaactagccaggcgtggtggtgggtgcctgtaatcccagttacacaggaggctgaggcaggagaatcccttgaacctgagaagtggaggttgcagtgagccgagatcacaccactgcactccagcctgggtcacaagagcaagaatccttctcaacaaacaaaaggaaaacagtaaaattgttggaactcaagaaataattgtagaaataaacaacaacatgggataaaatctagtctgtttaaataatgaatttatgaattggaagatagacccaaggaattcctccagaacacagcacagatcaagagatgaagtatatgaaaaagaagatatgtggataatagactgggaggccccagcatgtgtcataaagacgttccggaaggaaagaataaactagtgaacaaatatccacaaaaatattagatgagaatgtttcagaattgaagaaaccacacaccgtgctgctgaaagtgatttaaaaacaaaacaatacttctagacatgctgaagtgaaacatcagaaataaaagattttaaaaatttaaaagaattttaaaagctgtctgaggatacagacaagataatctatgatctaatgagaactaggatgaaaatagatttctccctatccatgatagttgttaaagacaatggggcaatatctttcaagtgtttaaaaaaagaaagaaggggccgggcgtggtgtctcatgcctgtaatcccagcaccttgggaggccaaggcgggcggatcacgaggtcaggagatcgagaccatcctggctaatacggtgaaaccctgtctctactaaaaatacaaaaaaaaaaaaaattagctgggcgcagtggcaggcgcctgtagtcccagctacttgggaggctgaggcaggagaatggcgtgaacccaggaggcggagcttgtagtgagccgagatagcgccactgcactctggcctgggcgaaagagcgagattccatctcaaaaaaaaaaaagaaggaaaataaccctcaacctaaaattctatacctagaaaagccaaagacaaaataaaactgctttcagacataaaaaaatggagggaatgtcccactcgggctctttctgaaagaattactgaaggatacacttcagtcaaaagaaaagaaaaaccagaaaagatttaattagaaagtgacaagaaatagataaaatatgttgataaatttaattactgatggtaaaaagtgggatttttttttttgcatgtttaaaaggaggcttgaactaaatttataaacaaaagtagcaaggacaatgggaaggaaaaaatgttcagtggataaaagcatactctgttgttgcttatttgtgcccctcaggagagagaatacaatcttagagtttgatgaaaaaaatataaataggtgtattggaagatacagaaatacagtctatagcaaattagtaggagataaaaggaggattaacaaaaagaaagcaaaaaacaaaacatcaattgaaggtaggaaaggaagagaaaaaaaggaaagaaaacacagggaacagaaaatataaaatgatggtttagaaataatttcaggccagtcacggtagctcacgcctgtaatccccacactttgggaagccaaggtggatggatcacctgaggtcaggagtttgagactagcctggccaacatggcgaaaccccatttctactaaaaatacaaaaaattagctgggcgtagtggcatgtgcctgtattcccagctactcaggaggctgaggcaggagaatcacttggacctgggaggcagaggttgcagtgagctgaaattgcgccacaatactactccagcaggtgacagagcaagactgcgtctcaaaaaaaagaaaaagaaaaagaaaaagtttcaaatatgatagtaattgcaataagtataaatagattaaattagcctattacaataccagcctatcaaattgaattaaaaatatagctatattctgcttataagagacatacctaaagaaaaatggtgtggaaagatttaaaataaaggaatggaaaaagatatgctgggaaagtaccatgaacgttggtatagcaatagtaatatcagacaaaatagaatttcaggacaaaaagactagggataatgtactcctttgtaacctggaatacttcttccccactcctgatgtttcctgtggctagagggaatactttggtgtaacacccgggctctcttcaccctccctgatgggcgtgtttgggagcaggaactcacgtgtgtagctgtgttccttcccccttttcctcttggacagagctgccctgagggtggtctcctgtgcagttaagtctcacctgagcagctccatgggagggggcttgcccctggcccgcactgcctgtgactgggtgggtaagttgggctgattctggtatttagttagacccgtttcatcttcacactaagccgtgtgctcccacgtggtggagtgattttgactccgaacaccttactctgttgtttgtttgcttttgaatttgttcagaaactgggcagggaaagagtcctttttctaggtcccccagaggccttggcctgtgtgattataaagagggcacgttctgtttttcatcaccctgatgttccgtgaacacgctctgttcacccggaatatctaacagtcattaacttgtacttaataacgtcgtcttgaattttaaaaagcaaaactgagagaaatagaaggagaagtggataaacactgagttatagtgggagattttgacaacattgctgagaacccggtggattgagcaggcaaaaaattgtgaggctatggaagacttgaaagatacagttaacaaatttgatcttggctaacatgtattcttgctcttagcaaaagaaaaaaatacattttttcaagctcacatggagtggcaaaaagtaaaagtccatgtattaaagtcaacacatttcaaataatatcatttagattgtgttccttgaatataagacaaattatcaacaattaaaatactggaggggaaaaaatctcatatttggaaagttaaaaactttaaaaaatgactaatggactaaagaggaaatcacaaaagaactgacaaaatatttagaactaaatgacagtgaagatactgtgtatcaaattgtgtgggctgcagttgaagtggtatttagagagagatgtatagttctaaatgcactttaaaaaaagattaaatgagtaagtatgtaggtcaggaagctggaaaaagagtagttgaaaaaactctgaagaaaatagaaggaaggaaataaaaaagacaagaaccgactagtgaaataggaagcaaaaataaaaaaggatagagatggtaaaagaaaaaactcagtcttactagatcttactagtctttcaaaagactagtaagatcgataaacctccagctaaaactgataagggaaaacaaggaaaagatacaaacaggccaggtgtggtggctcacgcctgtaatcccagcactttgggaggctgaggcgggtggatcacctgaggtcagaagttcaagaccagcctggccaacatggtgaaatcctgtctctactaaaaatacaaaaaaattagtcaggcgagttggcgggcacctgtaattccagctactcgggaggcggaggcaggagaatcacttgaacctgggaggcggaggttgcagtgagccgagatccagcctgggcaacaagaatgaaactccatctcaaaaaaaaaaaaaagaaaaaaagaaaagaaaagatacaaatagtattacagcagtaaaggtgaggacgcagttagaaacaaagatgaagtcttcagagaataccaaaaacaactttgtatcaatgtgcttaatgaatgcttttatataaacatataaatttccaaaattgactcaataaggagtagaaaacctaaacattcaccactaaagaatttgaattagtacgcaaaagtatcctcctataaaaacagcaggcccagagatgtcacagactagttttagcaaacctttaaggaatgagaaaatctctttattatacaaactatttcaaaggatcaagctgggcgtggtggctcacatctgtaatcccagcactttgggaggccaaggtgggtggatcacttgaggtcaggagttggagaccagcctggccaacatggtgaaacctcgtctctactaaaaatataaaaattagctgggcgtggtggcgcatgcctgtaatcccagctactcgggaggctgaggcaggagaattgcttgaacccgggaggcagaggttgcagtgagccgagattgtaccaccgcactccagcctgggcgacagagtgagagactccgtcttaaaaaaaaaaaaaaaaaaaaaaaaaagatgagaagcaacccagcaattttataagactggaataacaccttgatatcaaaacctggcaagggaagcacaagaaaataaaaaataggccagtgttgcttttgaacagagctgtgaaaatctaaataaaatacagtagtctcctcatattcatgggggaaatattccaagacccccagtggatgcccaaaatgtcagatagtcccaaacctgattgccgtcaatggaaacacatctgtttatatctttcacccacacatgtcatcctcttttcaccttaactaagcatttatgcactgtgggcataacttttgcagtttgaggtccaacagcaaaactagcaataatttctttttccttcttcacaatttcacacatagaaaattcatccgtaccatggatctcagcaaccttagcatagaatttttttctttccttattaagaactttcacctttcgacttaaaggaggcacttaacagtttctctttgtcatatccaaagtgccagcctcactcatgggccttgtactttggggccgttattagtatgataaggatgagggtggcttgaacacaggcggtgagatactgcaacagtccctccgatcactgagatggctgataagtgactgatgggtagggagcgtgtagggcgtgggtatgctggacaaagggaaaattcatgtcccgggtggatagagtgggatggtggaagatttcatcatgctattcaggacggcacaaaattgaaaacttatgaattatttctggaattttccatgtaatatttttttggccgtggttgactgcaggtagctgaaactggggaaagcaaaaccgtggataagggggactgctgtattaataaattgacttcggccgggtgctgtggctcacccctgtaatcccagcactttgggaggcggaggtgggtgggtcacctgaggtcaggaattcgagaccagcctggccaacatagtgaaaccctgtctctactaaaaatataaaaaattagctaggcatggtggcaagcaccagtaatcccagctacttgggagcctaaggcgggagaatctcttgaaaccgggaggcggaggttgtagtgagccgagatcacgccattgcactccagcctgggcaacaagagcgaaactctgtctcaaataaataaataaataaataggcaacaagagcgaaactctgtctcaaatagataaataaataaaaaaaataaaaaaattcaggatattaaaaataatatgtcagaagtaagtggagtttttacccatggaatcaaaaaacggctcaacagaaatgtaattcaccaggtcaacagattaaaaaccatatggttatctcctcagatgcagaaaagcattcagtaaaatccagcattttcataatgtgctgaatgaatcaggggatcaggctaaatttagaccctcatggtgaatccctttatgaagcagattccatcccatttatattttgagtaagcccagattttgaaatactaggttttcttttcataaaggtttaatttcatgacgaaacccaaatatatccagaagctgtgctcagttctttgggagaacacaaaaacctccaaacaaaccaaaaaataatggcatccttatttgcatttcccgtatttcagtggcagacagatatatcaggcgtgttctgttttttttttttttttttttttttgagacagagtcttgctctgtcacccaggctgaagtgcagtggcacaatctcggctcactgcaacccccacttcctgggttcaagcgattctcctgcctcagcctcccaagtagctgggattacaggcacccaccaccgcgcccagctaatttttgtatttttagtagagacggggtttcaccatattggccaggctggtctcgaactcctgacctcgtgatccaccctctttggcttcccaaagtgctgggattacaggcatgagccactgcccccagccaggtgtgttctttaagtagccacctccccagcatgcctaagtaggattccgttttcccacaaggcaagtgtgatgtgtggttgggccacctgaggccgatctggcctcagagaatcctgaagccagtgtcctatgtgctgtgatctcggccaccttcctcttggactgtttctttccttttcttcttttttttgaggtggagtctcactcttgttgcccaggctggagtgcagtggtacaatctcgactcactgcaacctccgtctcccgggttcaagcgattctcctgccttagcctcccaagtagctgggattacaggcatccgccaccacgtctggctaatttttttgtatttttagtagagactgggtttcaccatgttggacaggctggtctcgaactcctgacctcaagtgatctgccctccttggcctcccaaaatgctgagatgacaggcacgagtccccgcgccctcactgactgtttcttagggatgtccttttttctcccgtcttgtgcaggtccaaactgaagacggtacatgagcggatccccttggctggactgagcaagcttcccagtgtccctcagattgcaaaggtgagaaaccaacccgtgagagatggtggcttcctctctcagcccagggctggcctctggaatgggggtgcaggtatatcctgggtaggctcagcccttagagaaggggaggccactttactctttggccattgactgcactgataggggtctgggagggctgtgggcagatgcctctgtctttcctacgccctccatagctcatccttgttgccgaggctgcttaggaacagtatcctccatggtctctacttccaggtagttcacagctagtttgggaagtgagagaagtagaaagacggggctggatgtggtgagtgctgtaggacttccgtggaggggtgagggcgggtggcctggggaaccttcacagcagaggaaagggctgagttgggctgaaggatgatccagattgagcacccccttgagtaaggaggctgcgaacctgagaactgagttagcaaagtgggtgagcaagagagtcagctgggttggttggaccctcactctgggagcaggaatgtcacagaattgtgctggaaacctttggtggcagttgtgggctggatagtttttggccttgtcttcaggccagaacggtgacgagcctcaggctttgtctaatcccttcccacacttcatcagcaaaccccagaaagggcggttgacttgcctgggcacgtgttagtgagcagcagtcagaatccccgcccaggcctcctgacccatgtgcctcgccctcccatgccgcattgtccaggtgggcagaggagcccagatgtcctctacagatatcatccctgacctgcgtcttcttctcccttctcaggctttctgtgatgatgcagtgggactgagattcaatcctgtcctgtaccccaaggtaaggaccttcatgctcccaacataggggccctgcagcttggcaaggatttgcagacctgtggctctttggggagttctctgcatcatagtggggtttcgtggggtctccataataagcttccatgtctccctctctccctgcccaccccttcacaaactgctccactgggaacccaacctcagccatgcctaggtctccagcccagctgaattggtccccaggctgctgtgaaggtgacagagggtagcagtgttgtagcttctccaccacacctcattggtacctccctgaggccagtgctggaggtggacgtgactctgtagctgggggctggtgcagatccagtctgctgtcacagaggggcgggaagtacagcaggcagacaccaagaagagaaaggccagacagccgccccgccattgcctgtgttactgcagctctccggccatataagcctctgctgccttcatttataaaccagctggttttctgatatcagcttcctttgaattggcctgatactgaccccagttctgatatgggcgtgtgagtgggaagaagagcaataataataaacccactgaggaataattatggcacaagaggactgaagtcacccatggacagtgaattgcttgaaattggccacaggaaaagacccagtgcatcgactgcgtcttcatgggccagcaggctctggagagggacaacggaagcagagctgtgcttctgagcttctgccgtgggtcacgctgcagcggctgaggcctgctgggaccggctctgtctatcctctgagtcccaactctgacaaccaggacccgtgagatgaaatgtctggtgaggaagagaggccccattccagcagagacatccagaatcccctggaacaaacactctttttttgagactgagtctcgctctgtcacccaggctggagtgcagtggcgtgatcttggctcactgcaacctgcacctcctggttgaagcgattctcctgcctcagcctcccaagtagctgggactacaggtgtgcgccaccatgcccagctaatttttgtatttttagtagagacgggcgtttcaccatgttggccaggctggtctcgaactgacctcaggtgatctgccctccttggcctcccaaagtgctgggattacaggcgtgagccacctcgcccggctggaacaaacactttcagtgttcaggattgggcatgccactctcagaagcagccgtgtatccatctgcagtggctgagcgaatggcggagtcctttcctgcacagagcctttcgtcttccacgtgcctctgtttagctgttttagcatctgttgataccaggagtatgctacgcttcattgaacattttctctcattgagactgacctcccctttataattacaactgaatgagtggggtttaaccagacattaaaatcccatcataaaggtctaacttaactaccggtttggcaattttggttgtcaaatcttagccaccgagaggaccaatggtgtttatttgcagagttctctctatcccttggaaagcctcgggccttggtcataatggaagagcagctgtattttcatgttttctgtatctgaaggaccgctgagtccggctgggatgttcatctggctgagatgcacgcatgtgtgtgtttttaaaatttgcagagtttagaacgttctttggacgttctccatggcctggtgcctctccctggcagggcagctgttcctcccctgtgactcacccaggcaggagtggaggctccagggtcgggcagcagcgccgtcgctgggggagctgcgaagcgtccgtttccccagacagctgacagctgagagcctcacagagacacacagtgtgtggcaacctcacacaggccgcagattccggccaataagtcgttcctggtttgttcttcctctcgcataacgcgtggttgaatccctcctttttttttttcttttttaaatgtcacatttaatgttttcaccgctgtccttcaaatctaagttgtgcaaagtgaccagaaagtgtgccacggtaattgaccagcctctgagattgaacctttcacactggtgcctttttgggctctttggacgctaaacacgtttctcattcaagtgcgttgacatgcttcagttgggttgattctcaggagcgtcataaaaaacaaaacaaaacagaaacaaagatattgcgccatctttgtttagtaatttaatgtttgtgtctttcgtagcaaataattacttcattgaagttaaaacttccaaacataacttattaatggtcttcaaattcagctcagatcactcaagtcgaaagtactctgctaagtacagataatttaaaatagctttaacagttaattgtccataacacacaccaaggtttttttcctagaccaactgtaagacgatccattactattccttgtacaggtgaaaaatgatactcagttttcttgtctttttatttttaatgtaaaagttggaagggacgttcaaatttcaagtctccacactgagaatccctcctttttattgctgaggttatcccaacagctcccagatcttttcttcccccagtaagctggttcagctctgatatttctggagggtcatatagatgatgatggtgttgatgatgatgatagctgctctgtgctcagttctttctttttgaatcttcataaccacacatctgcgtttaacagatgaggaaactcagctccagagaagcagctcactcaaagctacataggtaaaaacagtggattcaaaactagagtttaggctgggcgtggtagctcatgcctgtaacctcagcgctttgggaggctgaggcaggcggatcacaaggtcaggagttcgagaccagcctggccaacatggtgaaaccccgtctctactaaaaatacaaaaattagccggtgtgatggtgggggcctgtaatcccaactactcgggaggctgaggcaggagacttgcttgaacccgggaggcggaggttgcagtgagccaagaccacgccattgcactccagcctgggtgacagagcgagactccatctcaaaaaacaaaaacaacaaaacccgaaaaaacttggagtttaatttttctgatcccagtcatcaactctatgatgcgtaacggaaaattagatagaaccaggagtcaggttttaaacatttcctctttgcatattgtattagggtatgttcctccttagcgtggtctccttagagacctctcattttatgcagaggggactgaagtttggtcaggagcggtgacttgctcggactcatgctgctgattagaggtggaattaggactagagttatccttgctgaccagttttggggttttggcttcactttttacaccacagattcaacactagggttaagtaagctgctggacacatgtgcccgagccttgactggcacatctggatgggagtggaatgagtgatacagaggtttggttcctactggggaagcccaagttttagaagctagctgactttggagctgcggcctgactgtctacttattatttctctctctctccctccgtgtatgtggatgtttcataccagggaacacattctctccccaaatggatgcttcccctgccatgtgcttcctcacttgcttccaaatttaacaaatgttgattttttttttcttgccacattttccaggcctcccaaatgattgtgtcctatgatgagcatgaagtcaacaacacattcaaattcggagtcatttatcaaaaagccaggcaggtaagcagcaccatccataccggtgactgtatcccgtggtttctcacttaggactctttttatccccacccagaacacaggagtcctgacctgcgttctgaagcatttggaatacaacggtcacatttaaggtatgaattagactggaggtggcagaactttccagcaagggtacttcttacaaaaaggcctgcacgtccttaaacagtgatgtttttttttttttaatatagcaaattctcattcttcctggctgcctcgtcttctacgtatttatgggctgctggttataagaaaaaccagactaggtcaagggaatggaggagcataggctgctctctccttgcccaaatttctccccactgggaattagctttttctccccaaacttgagtgatgtgatggagccagctgggtgcgtctcttcacaactctgttccgtgacatcatgttggcagcttgaagtcaaccatggtggaagtatttacactatggaaatttgcaaacaccagggtttctatcttcctcctttggagagccagtgactcaaaatatgccagcacaccactgctcagcctctgtgttttgtagccctcacacgttgctttggagttaactggccagaaccatgtttctcaaagtgtgtttcatgaatgcgagtctgatggtgtactctgtgagcaaatgacctggggaggggttgtcacttgtgtgggaaccttttaaaggcttaaagaacccccaaggtaaagggctctttataactttgttgaacttagtggtttccatacttacggacacaaacttcccatcttccctacctctttcctaccatgaacatttattaacatcccaagtagaggggttagctgaacacactgtttcctcaccgagactctttgagagaaaagttccacacccatttcatctttgtatcatctaagagcctagcatagaaatacaccttcatataaatacactccactgttaggtgagttaatgaacgaataaaaatgttggccctactaatggcaggttaatagtatcttctgatactatttgtatttttttgcatgatggtatctttcttggttagacgacacctgatgttctcatttagagatattggcccttaagagacatgcgtttgcttaaaaatattctaattatatgaagagtttaggatctgcaagacgaacactgatgaatcttataagttaagggagattattcaggtagctactataatcattttcacatattacatttttattttatacagctttgctaataaaaccccctaattaaagttctttgcttgtggaatttaccaaagcggatcttataagctgattataatccaatgttccagcaaagttataattactgaacatgagccatccgtctccgagagggagtctgtgtattgtttatgtacctgatgctgctgtggaggaaaaagccaagaagataatttttttttttttttttaagaacctaggcagattgttgttttgcaaacctgcagctgggggacatttaatatgaacatttgttgcatcaaagccctatgctggtctctgggtataaatgagcctcacctaactctcgtgtttgctgttcactgtgctgtgcatgctgggggatacggtgactaagacccctccctgagtgcacagtccagctcaaggccaggatcaaaataatggcaatactactactctcaggctggatgtgaatcttgcaagagaagtgcaggtcccacagcacacgctgcattgtttttctagtgggagatgtagtttgcctggaagcagctgctcttccacagtctggcctcatgacctggggcaagtaggacatgtggctagagttgtgacgccttcatggcatgctatagatcagggattggcaaacttttttgggtaaagggccagatagtaaatatttttagacttcatgggccttggagtctctgtgacagcctctcagctttgccttggtggtgcagaagtagcaatagacaatagataaatgagttggcctgtctgcgttccaataaaactttatcgataaacacaggcagcaggccagacttggcccatgggctgcagtttgttgactccttctagagtgcggtgtttcccagccttcagacattcacagaccatatccaggatctgtatcatagcatttgttgcaccctatgccactgttaagatctttatcacaatattttaacgaaatattttctttaaaaagttttgttttaaacttacatacatttattttttatttttatttttatttttttgagacggagttttgctcttgttgcccaagctggagtgcaaaggtgtgatctcggctcattgcaacctccgcctcccgggttcaagcaattctgcctcagctccctcgagcagctgggattacaggcaggcaccaccacgcccagctaattttgtatttttagtagagacggggtttcaccgtgttggtcaggctggtctcgaactcccgacctcaggtgatccgcctgccttggcctcccaaagtgctggtattacaggggtgagccactgcacccagcaacatgcatttatttttaaaggaaattttatatcactcctctaactggaaaaccagtatcatgaaatgaaggtaattctaaaaaaaaaatactgtaaaaagcaaaataaaattattgaaatctaccagattctgttgcctgttgaaggcatggagcccaagttctgctttttgttgttattgttacaattacctactgaagacattctcttgaagtgattgggtaggctagagtgtctttgtatcatctgccgctcttcatggcagcctgtgcatgtttgcagagccttcagctgtttgtacatcctgctactgtgggtagagcctgttgatcaggcagtgtttgaaggctgttactgtttgcagagcttgctactgttttcagctttgttttttacaaaattagccaggagtggtggtgggcgcctatagtcccagctacttgggagtctaaggcaggagaatcacttgaacctgggatgcagaggttgcagtgagccgagatcgtgccattgcactccagctggagcaacgagcgaaactccatctcaaaaaaaaaaaaaaattactaacctttttatctttaggtatttgtagattcacatagagttgtaaaaaataatacagcgagatctcatgtaccctttacctactttccccgcaaagtaatgtctgacaaaacgatagcacaataccacaaccaggatgtggacatcaatctcccagctccagtccgtaacccctgacaaccactcatctgttctccaacttctaaaacattgttatttcaaaaatggtatataaatgtagtcatatagtgtataaccacttgagattggcttttttccagtcagcaagattaatccaagttcttgggtgtatcaatactgtgttctttttcattgctgagtagtactctgtggtattataactgtaccacagtttgtgtttaaccatcacccactgaaagacatttttggctattatgaataaagttgctgtgaacatctgtatataggtttttgtgtgaacataagttttcatttctctgggatacatgcttaggaatacacctgctgagttgtatggtaattatgtgtttagttttgtaagaaactgccggccgggcgcagtggctcacgcctgtaatcccagcactttgggaggccgaggtgggcggatcacgaggtcaggagattgagaccatcctggctaacacggtgaaaccctgtctctcctaaaaatacaaaaaattagccaggtggtagtgggcgcctgtagtcccagctactcgggaggctgaggcaggagaatcgcttgaacctgggaggcagaggttgccgtgagccgagattgcaccactgcactctagcctgggtgacagagtgagactccatctcaaaaagactctgtctcaaaaaacaaaaacaaaacaaaaaaaaaactgccaaacagttttctagtgtttcttctcaccagcagtgtatgagtgatccagtttctctataacctgccagcatttggtgttgtgactgttttttattttagccattctgatagatgtgtagtggtatcaccttatggttttaatttgcatttctctaatggttaatgatgttggacatcttttcatgtgcttatttgccatctgtatatcctcttaggggaaatgcctgttcatgtcttttttttgagacagagtctcactctgtcacccaggctggagtgcagtggtgtgatctctactcactgcaacctctgcctcccgggttccagcgattctcccacctcagcctcccaggtagctgggactacaggcacgtgccactatgcccagctgatttttgcatttttagtagagactgggttttgccatgttggccaggctggtttcgaactctggacctcaagtgatccacccgcctcggcctcccatagtgctagaattgcaggcgtgaggcaccgcgcccggccgttttcatgtcttttgaccattttctaaatggatttttttttttaactgttgggttaaaaacatttttaaaaataacagctttattgagcacatcagcataattcttgtaccatataattcataatgttatgtaatttatatctcaatgaagtgtgcagttcagtggtttgtagtgtaaccacagaatcgtgcacctgtcctcactaactccagacattttcatcacccccaaaagaaaccccacactcaccagcaggcactccccatccccctttcctttagttcctgccaaccctaatctaatttctgtctctacagatttgcctattctagaccttttataaatggaatcatcatatgtggccttttgtgtctggtttctttcactcagcgtaatattttcagtgtttatccaggtcgtagtatgtatcagcacgttgttccttgttcatggccaaataatattccattgtgtggatagcccacattttgtctatctattcatcagatggacatttgggttctttctccttttgggccattatgaatagtgctgctattgatattcatgcatacattttctgtggacatgttttcatttctctttggtgtatacctgagagtgaagttgctagatcatatggtgactctatgattagcctttggtatatacctcagagtgaagtttctggatcatttggtgactctgtttagcctttggcacatgcccgggagcaaagttgccagatcatatggtgactctgcgtttagcctttggtatatgcctgggagtgaagttgccagatcatatggtgactctgcgtttagctttccatatatgcctgggagtgaagtttctggatcacatggtgactctgcgtttagcctttggtatatgcccgggagtgaagttgccggatcatatggtgactctgcgtttagctttcgggacctgcctgggagtgctgttgccagatcatatagtgactctgcatttagccttttgaggaactgctggactgttttccacagtggctgcgtcattttccattttcagcagcagcgtgtgatggttctgatttctccacaccctcaccaacacttgttattgccttttattgcctttatttttcattgtggccatcctagtgggtgggaagtggtatatcattgtggttttgattactttagagttttcagagttctttattctttttttttttttttttgagacggggtctcactctgtcacccagaccggactgcaatggtgtgatcttggctcactgcaacctccgcttcccaggctcaagcgattctcctctctcagtctcccgagcagctgggattacaggcacccaccaccatgcccagttactttttgtatttttagtagagacaaggtttcaccatgttggccaggctggtctcgaactcctgacctcaagtgatccacccgcctcagcctcccaaagtactgggagtgagtctccatcagtccctcctctctccaccccagtcccactgagggcagctatggtggatgtgctgggagacagggagaaaggaagaaagggaccaggtacctgggcatccatattccttcctttagcatcagaaagaatttttctaattcctgcccttattcctgtttctctttcagaccctggaggaggagctatttgggaacaatgaggagagcccagcttttaaggagttcttggacctgctgggggacacgatcacactgcaggatttcaaagggtgggttttagccaagtgacggctccagctccatcaacaagggcactagaggaagggcaagacagctcagtcctcagggagcacgtgtgagttaaaaacacacaagaaatgagggatggcttttcagggtcttgtcgctcactgcatttctaaggaatcaggggtccaaggagtgatccagtgtggcagattcccctgaaggcgttcacgttcggccctgggccccgccccagatgtgccttcctacttacctttggcccagactgagaatggaaggaatccaccttccctgtcactcacctgccaggtgtgtgggaaagggagccccgtgcagttttggggggaaatgacctattttattttattttttatttttttatttttggagacagagtcttgctctgttgcccaggctggagtgcagtggtgtgatctcagctcactgcaacctccacctcccaggttcaggcgattctcctgcctcggcctccggagtagctgggactacaggcgcccgccaacacgcccagctaaggtttttgtatttgagtagagacggggtttcgccatgttgcccaggctggtcttgaactcttgagctcaggcaatccacccacctcagcctcccaaagtgctaggattaccggcgtgagccgccgcgcctggcctgaaatgacctattttagataatacacaaagaatgcatcatgaggagctgatgcaaatataacagttcctcaggcaggagtccatacaacagtctatgcttttttttttttttttgagatggagtcatgcgctttgccaggctggaatgcagtggtgcgatcttgactcatggcagcctttgcctcctgggttcaagcgattctcctgcatcagcctcccgagtagctgggactacaaggcgcgcgccaccatgcctggctaatttttgtatttttggtagagacggggtttcaccatgctagccaggatggtctcgatctcctgacctcatgatccgcccgtctgggcctcccaaagtgctgggattacaggcgtgagccaccgtgcctggctcagtctatgcttttttaagtgggcagtaagatagaacattggggccgttgcttggaaaactctggcccttgactttccttggccaagaccgcatttgggatgagtccagacctggccagcctgttttgtccttggtggctggcagatggctccaggccccagaattctccatcccagcagccagattgacatgagctcctcacatcgtgtgaaaatacctagcccagtgcctggcacacagcggatattcactaattgctttcttcctctgcttccttctctgtccttccttctttttcctttcctctcttcctccatcttctccctccctcaaggtcatcacggctgtctggggtcagtcacacctgggataaaacccccgctccatcacttattagctctgtgactttggataagtgacttgacctctataagcctcagtttcctcactgtaaaaagcgagataaagggctgggctcagtggctcacgcctgtaatcccagcactttgggaggccgaggtgggtggatcacgaggtcaggagtttgagaccagcctggccaatatggtgaaaccccgtctctactaaaaatacaaaaaaaaaaaaaaaaaattaggcaggcatggtggcaggtgcctgtcgtcccagctacttgggaggctgaggcaggagaatcgcttgaacccaaaaggcagtggttgcaatgagctgagattgcgccagtgcacttcagcctggtcaatagagggagactctgtcaaaaaaaaaaaaaaaggaggtaaagatagtgtcagccctaaaaggttttggggggattaaaataagataatgggctgagcgtggtggctcacgcctataaccccagcactttgggaggctgaggcgggcagatcacgaggtcaggagattgagaccatcttggccaacatggtgaaaccacgtctctactaaaaatacgaaaaattagccgggcgtggtggcacgtgcctgtagtcccagctacttgggaggctgaggcaggagaatcgcttgaacccaggagatggaggctgcagtgagctgagattgtgccattgtactccagcctgggtaacagagtgagactctgtctaaaaaaaaaaaaataaataaataaataaaaaataaaagataagataatgctcacgaaacacttaagtgctgttcagggctagctagtcacgattgttattgttcttatattgccaccttccattgactttgagatgctatcattataagacacatcctgtgactttaaaatgtgaaaaaacggccaggcatggtgggtctcacctgtaagcccagcactttgggaggccgaggcgggtggatcgcttgagcccaggagtttgagaccagcctgggcaacatggtgagaccctgtcattaacaaaaatttgaaaaattataaaaattagctgactattgtggtgtgctcctgtggtccccgctacttggcaggctgaggcgaggaggatcgcttgagcccaggaggttgaggctgcagtcagccatgattacaccattgcgctccagcctggatgacagagtgaacccctgactgaaaccaaaactaaacgtgggccttagaatagctgaaatacagtatagtaagcccagaaggtcctcagagttatgaaattctatccctttattttatggaggcctagagagactaaatgaattgtccacgatcacgtgctgatttagtggcagaagcaggtctagaacccggagctcctgccccctgtccagcattctttctgccatgccagcctgggcacattttctggcttgtattgtagtgttggggatgctgagattctaggtccatcttatttcattttcttaaaggaacctgcatctgctgaagactgtgatcaaagctggcagccgtgtgtataaaggcagaagggacaactcctggaagcccacccagttccttagagcttttctttcttgcctgtgaggagacagccagagaagggacttccctggatactcccaagcgggatgctgcagtggttgggcctgtatcttagggactagctaggcagaagttgagcatctgccacctcttctgactgactccagatgctcctctggggctccccaccagccaccaggatggctggctgccctagctctgggcagaggacttggacatggccttgcagagagcaaagaaaggccggcgccccaccttgggggaatggcaccggggatgggcatttgtctgggattgtggatggatgcgcttccttcccatataaccagcaagtgtggacacggcacagccaaggcttgagatggaggttctgctttgtgattgattggttgattgattgattgatggagtcttgctcttgttgcccaggctggagtgcagtggcgccatctcggctcactgcaacctccacctcctgggttcaagcgattctcctgcttcagcctcctgagtagctgggattataggcatgcaccaccatatctggctaacttttgtatttttagtagagacgggggtttcaccatgttggccaggctggtctcgaactcctgacctcaggtgatctgcctgcctcggcctcccaaagtgctgggatgacaggcgtgagccactgcgcccggccagctttgtctaaataatgggtttgtgggtagagtgccagcgctgatatacctggaagaacagatctacctgcttttcccacatcacagcctgctctgccctcagctctcctgtctcctctgctgcgtatcctctgctgcgtatacttaggggagcttgcattaagttgcccactttgcctcactctcttttctccccatctcctgccctgttttgttgacagtttccgaggaggcctggacgtgacccacggacagacaggggtggaatcagtgtacacaacattccgggacagggagatcatgtttcacgtttccacaaagctgccatttaccgacggagacgcccagcaggtaacctggtttgggagggctttgggagcccagggcgggcgaggtgagggcctgcctctggtctgacctgctaagaggctgtggccgtccccatattcgttcccgtagccggccattcgttcagctgcgcagcagcgtcacagtccgttctgctgtgtttctggccgaggctgtgcctcagcggtccgttctgttgtgtttctggccgaggccacacctcaggggccctgggcgggaggcggggcagagcttgtgtttcttccacgttgactgatgggaaaactgcagcccatggtggtgacaagacttccttgaggtttctccgtttatcaggggcagagcccagggcagagcctgggggccctggtcatagagggtggtggcaaagggtgcatggtggggtttgcagatgggggcctgaagccgcctgtgccactttggagcgtgtgactctgggcaagccagttaaccttctcatctataaaatggggggtaacaccacccatggtagagggtgattgtggggattacatacatttctgactagggttcatacgatgcccaattcatggctggcttcctatagaacagctgttcactgtccagcccctggtcattttgtcccccttcctgccccagtgacggaaggctggttattgcgtgagaatccttccccacccccagccttcctcatctcacaggctcctctctcaccacacctgtgggaattcagccttgacctccactagggagacctggacgagacccctgtccccactgctttcctgccgtgccccccgtttgctgctctgacagccgtgcatccctggggagagccgcggctggttcctggctgttacaagcccagttcccccagcctgccttctgccccttttcagtctgggaaaataagaaaatgcaggcaggcctttgcccaaactctgacctgtgtgtctctgagcaggaactggggagggagcacagatgtaaaattgtaaacatagtgcctggcttcttaggaaagaaggaaattggcaaacgagatgatgagttggctctaaaatagctactgaatgttccagaaacaaatggaagcagaaatccttttgtatccaaagtgggttttcattcaacctttcacctccagcccctctgttcccttatggcctctctcacctgctgccccggcctgggcctgaggcctgttctctctgggccttctcagtcttatgtgtgtttcttgggaaatacaccttggcacagggctcggctcttggcggggactgagtaaatattaagtttctcttcctgagaaatggaaagatgcgcgtggagtaagtgaggcaatttgtgtgaaagtgcccagcacagtgcttggtgtaaaacaggtgctcagtgaatgagaaactcagtgtgaagggactgagcattgggcctgcatgcagtgggtgcttaacaaaggaacaaatgcatagacaggcacctagccaggactcgacatacaggagcgggtttttgtgtgtgtgtgaggagggctgtcactctctcacccaggctggagtgcagtggtgcgatcatagctcaccgcggccttgaacttcaggacagggttaacatttgatatcatgcatgaacagcccaacatggttccagggacacaccaggtgcttggtggccgagatcacacccagaagcacctggccctgcttgggatatggagttatggttgggatcctccttccatcccacctacgccaagctgggtgagcagtgctgtcatgatctgccacctcatcactctcattcacaccttcaagaccccctgacacgtctcctcctccaggaagccctctcaggttgctttccagccctgtaattttgcccttgcctctgtctccagagctgtcagggatttcatgcacagcagctgacttagcccttgctggctggtggctttgttagttttctcaggtggcttcacctgtgtttgtatttctcccagatcaatgacaggctctaccagggcaagaccccgccttgccttttaaatattcttgccaagtcctgagtcagggatctgcatgctgtagaggtcagtaagatgctcgctagcctctacctaacgacttggccatcttccccattttttttttcctttttggtggcttctaaagattgaaagaaggttgggcacagtggcttatgcctatcatcccagcactttgggaggctgaggcgggctggtcaggagtttaagaccagcctggccaacatggtgaaacctcgtctctaccaaaaaatacagaaattagtgggtgtagtgtcacgcgtctgtaatcccagctactcgggaggctaaggtgggagaatcacttgaacccaggaggcggaggttgcagtgagccgagatcgtgccacggcactccagcctgggcaacacagtgagaccctgtctcaaaaaaaaaaaaaaaagaaaaaaaaaagattgaaagaagaacccccctggttttccccaaataggaaagcaactcaaaagatacacaaagcacgaagcgtgttccatgcacttctccccttgctgcctggcattggtactgtgctttcatacttaaacttccaaaacaacaaccacgaactcttctcactcagaattcagttttcctgtgtgcaaaggaaagtgaacccactctttccccaaaacatctttcatgattttcctaactggcttataacctctcaacactttttatttagctccagagaaagagacacattggaaatgacatcgtggccatcatcttccaagaggaaaacacgccgtttgtcccagacatgatagcctccaatttcttacatgcctacatcgtcgtgcaggtcgagaccccaggcacagagaccccatcctacaaggtaaggagaacgccttgttggagggagtggtgggcctcgacacctcaccctgtgtggatgctgtgatatcagaggacactagtcctcagcagtcagagattctccatgagtttgcaggtttctggggtttggagctagattctgggtagggaggaccttccaaggccacctgatcccccttgctgcctccgggctcaatggcatctcacttgaggattgaggaggtgtgagtgtagtatttggaatttggtgatgccatttgctcgctgtgagtgtagtatttggaatttggtgatgccatttgctcgctgtgagtgtagtatttggaatttggtaatgccatttgctcgctgtgagtgtagtatttggaatttggtgatgccatttgctcgctgtgagtgtagtatttggaatttggtgatgccatttgctcgctgtgagtgtagtatttggaatttggtgatgccatttgctcgagtaaggcagagctggaataaagaaagagcgtggaaaggacgagcaggaaagggtagcgatagaagggtgctaacgaaggaaaaaaagaaaaaaatgttgatggtgagggtggagaggaggggcctggtagaccctggccactgggtaaggccctggcctggctgttttggacaaatgatggatcttaatttaaagacctccagggaggcagatacgcaagcacctgggtctgaacctcccaagcagtcacgggtctgtcagatggctcgaaatcctcaccggtgcagatgacagcgagacagggcagctcattgcccctgcagtcccccgctccccactcctcatggctggatctctgaccctccctcctctgctccacgagaaagaatctccacctcttgggcaacagtctcttggtatcacagtgctgtggcgggcatgggactcaagggcgttggactgaggcaggctttcaaggcaagggttaggcagtctctgactccctgcagataaatgcaaaatgctgaatttgtgcctttccttggattcctgaaaagagaggccataccttaaattctcaaagcgctccctgctccgcaaaatatcaggaaccactgttctaagggggaggaaagatgagcctgtgattgccaatgggtaaccatgaggcctgaaaatgtttcccgtcaaataatttcagcccatcctgattcctggggttcatgaggccacagcagttcaactcagttaagtgcaaaattcacgtcagcttttaaaatgtgatgtgaatcgtcagaagaaaataaaaagaggctgggcacggtggcgtacgcctgtaattctagcgctttgggaggcagaggcaggaggattgtttgaggccagaagttcaagaccagcctgggcaacatagcgagaccctgtctctaaaaaaaaaaaaaaacagaacaaaacaaaataaaacaaaacaagcaacagaaacccaatagcaaccccctcctgttgaggctgattccttcatgcccaggctcatgtgtccctgccattgagcagttttagctgaagctggcgaagacatggtgtgagcatttattttcttttcttttctttttgagacagagtcttgctctgttgcccaggctggagtgcagtggtgcagtctcggctcactgcaacctctgcctcccaggttcaagtgactctcctgcctcagcctcccaagtagctgggattgcaggctcctgccaccatgcccagctaattttttgtatttttagtagagacggggtttctccatgttggccaggctggtctcgaactcctgaccccaagtgatctgcctgcctctgcctcccaaagtcctgggattataggcgtgagccactgtgcccagcccatttcttgaaggctataggatcacctgctttgagtgaaatgggcattcacttcaaacagctgctcgattcaagtgttggttgaagcaagttgacttactcagtgcctactgtgcgccaagctccaggctggaatggggctcgtggaggtaacagaatcagcctcagggccttcctgatgccggagaaggggcagaagaagcagggagtgcaggtccaagcaccaggctgaagtggggctcgtggaggtaacagaatcagcctcagggccttcctgatgccggagaaggggcagaagaagcagggagtgcaggtccaagcaccaggctgaagtggggctcgtggaggtaacagaatcagcctcagggccttcctgatgccggagaagggacagaagaagcagggagtgcaggtccaagcaccaggctgaagtgaggctggtggaggtaacagtatcagcctcagggccttcctgatgccggagaagggacagaagaagcagggagtgcaggtccaagcaccaggctgaagtggggctcgtggaggtaacagaatcagcctcagggccttcctgatgccggagaaggggcagaagaagcagggagtgcaggtccaagcaccaggctgaagtggggctcgtggaggtaacagaatcagcctcagggccttcctgatgccggagaagggacagaagaagcagggagtgcaggtccaagcaccaggctgaagtgaggctcgtggaggtaacagtatcagcctcagggccttcctgatgccggagaagggacagaagaagcagggagtgcaggtccaagctccaggctgaagtgaggctggtggaggtaacagtatcagcctcagggccttcctgatgccggagaaggggcagaagaagcagggagtgcaggtccaagcaccaggctgaagtgaggctggtggaggtaacagtatcagcctcagggccttcctgatgccggagaagggacagaagaagcagggagtgcaggtccaagctccaggctgaagtgaggctggtggaggtaacagtatcagcctcagggccttcctgatgccggagaagggacagaagaagcagggagtgcaggtccaagcaccaggctgaagtgaggctcgtggaggtaacagaatcagcctcagggccttcctgatgccggagaagggacagaagaagcagggagtgcaggtccaagcaccaggctgaagtgaggctcgtggaggtaacaagatcagcctcagggccttcctgatgccggagaagggacagaagaagcagggagtgcaggtccaagcaccaggctgaagtgaggctcgtggaggtaacaagatcagcctcagggccttcctgatgccggagaagggatagaagaagcagggagtacaggtcagccactgggcagctgaactactcaactgcttcttttaatagacagttgaagaggaagaactactgggaaggatccttggaatgaagccatgtgataggagggctcccagaccctctggcagaacgaggcctcctgtagacgtttagcatttgcttctctttcccaataggaaatgcatctcagctaaccagcttctccactttcccgagaccttagccgagtggtgcactcatacagagaaaaatcagagatccaaaaaagcgccaccccacctccagctgtggtgctagaagtctttacccactcttcttctccttttttttttttttttgagacagtctcgctgtcacccaggctagagtgcagtggtgtgatcttggctcactgcaacctctgcctcccgggttcaagcaattctcctgcctcagcctcctgagtaggtgggattacaggcacccaccaccatgcccggctaatttttgtatttttggtagagacggggtttcaccatgttggccagaccggccttgaactcctgactttgtgatccactggcctcggcctcccaaagtgctggcattacaggcgtgaaccatcatgcctggctgtctttactctttcttctaagccacaaagcacagcattgtcctcagaggggtgatgagaagcaggggggcagggcttcccggaggagcaggctgtggtaccttgatcgtgcactccacctgccaggcagacactgaggctggaaggccagacgtgtgaatgaggccagggagggggaccagccttccaaggcactccccaaagcgctgtccatccacactcccggcagcaccccaggtaattagcagactgcgaggaggacccggttagatcccccagggggcctgggtgaagcaggaccttagctggcccctgcaggctcaggggctgtggcaaagaaggctgagatttcctctgggactgagtaagccccaggaggcctccactggggagggtgagctgaagaaagaagagtataaaggagggacagggttgggtgtgtgcaggaaggggtcctcttctgtccacggaggggccgggctgcctggggttctggtcctggcactgcctctgctgcgtgaccttgttccttccctctctgggcctctagttttgtctgtgtgaaatgaggaagttggattagacacctgcaggctgctagccctgacatcctgcgggagggaaggaggcgtgcttgggtgtgtgtgtgtgtggtgggttgcaaggtgctttggggaaactctatttcaggagccctttactgggtgcaggtcagcaggggaagtgaaaaggccactgggcgacagtggttaccccttaccagctgcttgctcatgccaggcacggtgctgggtccttagacgcacagtcttgaatcctgacaagcccctggtgagacaagacctctcgctagagggaggaaatggaagctgagagctgaacccacttaaggcctgaggccacagagccagggagctgtggctgaggtcctgtctgggtctgcttgcggtcttggtcattgagccatcagagcaggcgagaaattggctccacggagtcgggtgtgcacgaagcatcactctggattatttttcagaaatgagtgtagtcctcatcctgcctgcttggaaggaaagtccagctcagccatcaccaggactacccctttccctcccccctatccctgcctccctctccggaagtcctcaaaggtgtcaggaatctcaggtgaagcccaccgccggggagggccctgtctttgtagccccctccccgtttcccgtcacgacttgtctgttgctcggacgatgctctgtgtgccaccgcggctcccaggccactcttgggcgtggggcctttgtcacgtttgaagctttctgaggttcccagtgcatcctcatgacccacaccaagctccttcctccttccagccatgcaggtcccttccccagagtcacctgcatctgcctctctccctccctccaagccctcgctggaggccctcgctgcatttagaaaacaggaaggtggggctgtgttcaggcaacttctgctttcagtccagtgacccagatgtccccaagaggggggaacaacaaaggcctggccgcctggttggaatggggtcaagagaggcgcacaatgaggatggaaggtgaacgcacgtcgcaaggaagggccctgtcctccgtgtggcccacagggctctgctgtgggactgtccagctggagggttggatggacttgaggatgtgtctgaagccacttacacggtcggcacagaccactctaatgcaggctggaggaggagggggagtggggtgggaagggcagagctggggctgccctctggcctctgtcccaggtgcccacggtctgcagtctccccatagccttcccacacccccacccctgattctggctctgtgactgaattcttgacctgggccaccggtgcctggtgggtggtggtagggaaccgggttcagctgctggagcccagccagaaatcacgtcagccgaacgcgcaccatttcctgactcggggcactgcagtttgggctgggcagacagcctggagcttgagaagagaaagcccgtattgaccagctctctcccgctccgtttcccctccggactctggcagggcctttccttggctcggtgcccagctgcctgctcacccggcctggcagactctgcatctgctccacttcacaggccggggaggctggcagcacgccagggctgggctcacgtcagcggctgtgtagggaagggagggcagtctcccgagagcctcacagcctcgtgggctgagaataggtgaagtcagggcacctctgtgcagagggaaggcggggtgtggggcccgtcccacgcctgggcgacccccatgcagcgaacctcgaggccgtcactctaaagctcagtctcactcagggtgccagaggtgcgcgccccaccctcagttcctagcctgggcctaggactggctgaccccgtgtgtggggccagggctcccgaacacgggtccaccggctgcacgagagtttccggggggccctacccttccgattcggcaggtttaggccagagcccatgaacccagtctgtatttttaaacacctgaagcaattttgaagcaattctgatttatggccgagctgaggagtcaggcttgggaagagaaccccagagacgggtcgggagaggtctggatgctctgttcctctgcggctaatcacctgtgggacttgggggcttctctgtgtgtctctgggcatctgtttcctcatcagggagaacagttctccctgtgccttctcagtaggattagcgtcacggtcgaatgaggtcacgagatgccatctcccgggcacttgtatggcattaaaattagggtcccagccctgtccagtcatcttgccaaacctgcttctggcctccaggaatgcagatgagaggctgcggatggccccacaccgtccggccccacttctaggaacagggtcagggcctgtgctggcgatgctcacaggagtattttgtttgtgttctgggaagaggaggagggagaaggtgagtagctttgtaaggagcgtggctcccgtaggggcagcgctcgtctcttccctccaggtccgtaccatgactctgtttcactcaggtctctgtcactgcgcgggaagatgtgcccacctttggtccacctctgcccagtccccccgttttccagaaggtaggacactcttccttctgcccctctcgcatccacgatgccaggtctcagtgcttgagtagcaatggttgggatggagccaaattcaggctgggaacattagggagctccttttgcaggttttggggggaacctcctttcttggggtctctccccacctctttcatgctgccagtctggcccagcataggaccacttgtcagggtgtttgacactggggttgcttttctgctgaaagacgggcttttatgttgagccccggtcaaggagccttgggcaggaatgagctccagtcgtggaagtgccactgtggcttcccaggaccagggaagcgggtttccttgttgggatatttgcaagtgggcttggcctgggctagaaatgatccgctgtcggaagggacttttcaggggttctccccatggccccggctctgcctgcctgtcactgtggctgaagaccttctggcaacagccgagagtgacagacctgaggtccgtcttgtctcttccagggcccggaattcagggagtttctgctcaccaagctcaccaatgccgagaacgcctgctgcaagtcggacaagtttgcaaagctggaggtgagagtgtggtttctgaaggtctccctcctgactgctgggccacctgttagccagcctcatccagggctcctccatcttttttttttttttttttttttttgagacagagtcttgctctgttacccaggctggagtgcagtggcatgatcttgggactcaccacaacctctgcctcccgggctcaagtgattctcctgcctcagcctccctagtaactgggattacaggtgtgcgccaccacgcccagctaatttttgtatttttagtagagacagggtttcctccatgttggccaggctgatcttgaactcctgacctcaggtgatccgcctggcccagcctcccaaagtgccgggattacaggcgtgagccactgcgcctggccaatcagtccttttttttttttcaagacagaatctcactctgtcacccaggctggagtgcagtggcccgatcttggctcactgcaagctctgcctcccgggttcacaccatactcctgcctcagcctcccgagtagctgggactacaggcgcccgccaccacgcccagctaattttttgtatttttagtagagatggggttttgccatgttagccaggatggtcttgatctcctgacctcgtgatccgcctgcctcggcctcccaaaatgctgagattacaggcgtgagccactgcgcctggcccaatcagtcatttttaaagcacctactatgtgtcaggccctattctgttccctgggatatggggataagtgagacagtttctatccctggagagtacacagggtagtcggggggtggggcagggggtcattactaaatagatagttatagtacagtgtgccagcactaggctgggatggaggtcagcacagctcagatagtgactgtttctgcctgtaggggacagagggtgtgttcagggaaggcttcctggaggaggtggctcatgcacagctgaatcttgatatcagatgaaccttctgccaggaggaaagagtggggaagggagggctgatctggcatggtagacagcatgagcaaaggtcaggaagaaccagagcctgacgtcaggagggagctcctgagggtttgctgtggctgaaggacccacgggggctggaatggtggagactcagccggagatgttggttggatcagatccagaagggctttgagctcgggacggtgggctgctggtaaagcgcttaggcaggagagtgaggggctcgatgtgtatgccagagggattgctctgacagtggtgtcattgagaacgatggtgacaaggacaggttgcagggcaagaggtgcaggaaggcggccagttagaagctatttacaggaatgcaggagagatgacaaaggcttatactgtatggaaggaaatggtttagggtcaaggttgggaagacttggtggactcctggctgtaagtgttgtgggacgtgggattgattgtagggtgactcttgggcctttggcctgggctctttgatgacatggtggccaagttgtgcctgcgaaggccgggttgctgaaagggccagtcctcatctgtgtgaatagcggcccctggcatccatgtgcatggctctggacgaacatctggatggagaggagcagtggggagttgggtgcgtggatgtggagctggggcagagggccgggctgggattcactcttccttctgctcctctaccaccagggtggagctgtggcagtggtgggacgacccagggagaagggcagggggagtagagcaggaggccgagcacgcagccttcatcttagctgcagcatttgtgagcacgaagctcagctcagcagtaggtccacaccgttgctgggccgggctgggcagaatgtcagcctccaggccaggtgtctggagctcacaaggagcaggcacatctctgctctcagagccagcttctccatccccaccctcttcccttctaggaccggaccagggctgccctcctggacaaccttcacgatgagctccacgcccacacacaggccatgctgggactgggcccagaggaggacaagtttgagaatggaggccacggggggttcctggagtcttttaaggtatgagcgtcagagtgactgatggttgctgtggggttgggattggggaagaaaggaagtggtccaaggtccatgggatactgatcccagagcccaagggccagctggaggggtgacaggaaacgtatgggtatcctaggtgtttgcaaagggcagggccgttaggaagtgtgtgaggctggagcagccagcagttttctcagcagcctccccatccttcctctatctgggtcatctcctccgggcccagaagtctgttaagcagggacaggtaaagaggtagcagtaggagaggagctggagcaagccaggaacatcggcgctttcacctgcctcctcctgggttggggagcccagggcagaatggcaggagcgaggaccacagcccttacgggtcttcgtagctgctgtgggtgccacagtgattcttcctagccagccggccgagcattggaagacctggctgggcaggggccatggaactataggcaagtccctttggactttgccaagggaaaaaaactaactagaaggagctgctaaaggaagcagtgagctccctgtccctggaagtattcaagtggagctcggacggcccccgagctggcgtgtggtagaggtttttcatcttatgcttgctgagtgcttgttggtccacgcagcacgtagacccagcatctggctcgagcctggctgtcagcctgtgcaggtggcggaacgggtcttgttatattcacgaacacacgtggggacaggatgagagacgccacaggcctgctcaggtccttacaccgaggcagagttagagcctcatttcaaacgcaggtcttctgattcttaggtccgtgtgctgctggattgcctgttagaaggtgatttggaaactcccatctgggggcattatgtgtgggactttatggggaattatgtgtagggctacacccacctctattaaaaccgcagctctgtgggatcctgggcagtctttcaagcctcttaaggtgcagctttcttgtcaacaacataaggataggaagcaggacccctgtcagagccattgtgcgagttcattgataccatgcctggaaaagtccagattgcctggaatatagtaaatgctcaaaaatgtcagctgttattacagttgtataaagtgaaagcttcacacacattatcccacctggagattcacaactgccctcagtgccctgtgaggaaggctattatttggggtgtaataattttggtataatagttcatactcagttttaataatgataggcatagtattatatgggaggaaaccaagcctcaaagagacagaatcatttgtgggagcaggtggagttgaatccaggtccgccggattccaaatccgacaccacctcccacttcctgactttgttaagattccacccgcactagcctgggcccgggcaggcctggggtcagtcccccactgcccggctggaccgcagagagcagggcacagctcttcctaccctagttggggccagctgccaagatgcctcttggggttgggaaaaggagctgagctgcttgtccaggctggtgggtgattcctggggcacctgtttcagtgctgatggacagtgggagcccgggtgaaataggagaaattgggagatcaagacggaagagggatgcagaagaagaggaacgggaggagagagggcgccaggtcagacaacccagcgagagaatggagagtgtgagatgcggtaaacaggaaaacgggcttgggtctggggaaggcaggaaggggggcaccacattaagccttccacaggctctagacttccttccagaggctccaccacactccatagcccacgtatcaaaacattctgcatccctcagtaaatgtaatttatgcagaactataagaggtgaggccaggtgccgtgcctcacgcctgtaatcccagcactttgggaggccgaggcaggcggatcacgaggtcaggagatcgagaccatcctggccaacatggtgaaacctcgtctccactaaaaatacaaaaattagccgggcgtggtgacgtgagcctgtaatcccagctactcaggaggctgaggcaggagaatcacgtgaacccgggaggcggaggttgcagtgagccgagatcacgccactgcactccagcctggagacagggcgagactgtctcaaaaaaaaaaaaaaaaaaaaaaaagaaaagttgagctgcagttggggagccaacataatgttgtattttgtagacatttaatgaagcacttgttttgagttttgcaggtttcttgtagtattttggagttaattggtttttcaggtttcaagtatttctatatcctggagatgcttgtaggctgtggacactctgcccatggtgcccaatggaggaggtggtccagcagctaaatacaggtggcaggtataaagagagtggcctgaggccgctctgtccagtcccccgcctctggcaggagtcgcagttgatctgtgcttgactcgagggggtctgacgtattcctagaggggcttacaagagaggaaacactttaagactttatcacgactcatctttgatccagtgatccagggaattcttttcaatactaaaaccctgcaactgtaggttgaagacaggcctgcttccagattctgctctcacacctacctgaggtagcaccgtggggcgtgggagagactgtgacagtcacacagagtaagcttcagggccctgacggttgtgaccagattttttttaaatttttttattttttaattttttttgaggcagggtcttgctttgtcacccaggctggagtgcagtggtgcaatcttggctcactgcaacctctgcctcccgggttcaagtgattatcctacctcagcctcctgagtagctagaattataggtgcccgccaccacgcccggctaactttttgtatttttagtagagacgaggtttcaccatgttggccaggctggtctcgaactcctgacctcaggtgatccgcccacctcagcctcacaaagtgctgggattacaggtgtgagccaccgcgcccggccatttgtgaccagcttttttccctcccacctggggagcacgagctcctgttccctgtccctttcgtcattgccctcacatctcccaagcatggaggcctgagctggggacaggccaggctcagccgaatggagccctggggcctggggtggattctggtgtttaggccatgcctgtggccaggcctgtgtgtctggcccagctcaggaaaccatccctagttttggtatttttttttcctgggcaccttgggcggtgctgctgtgtcaacaggacgttgcttagggagttcacccacaccttcctgggatcgctcttgaaacaagtgatacctgaaatgttccaggaagaaaagttacaggcctttatctcttcctgtcaaagtttttttttttttttttttttgagatggagttttgctcttgttgcccaggctcaggctggagtgcagtggtgcgacctcggctcactgcaacctctgcctcccgggctcaagcgattctcctgcctcagcctcccgagtagctgggattacaggtgcccgccaccacacatggctaaattttttgtatttttagtagggacaccatcttggtcaggctgatcttgaactcctgacatcaggtgatccgcccatcttggcctcccaaagtgctgggattacaggcgtgaggcactgcgcccggcctccttcctgtcaaagttctcatttcccaggctgatgggagcataactgagaatccccagggctgaaagccatctcagccatccatccttgcccctggtgaggctgctgctcccccacgtcagcactgacccttgatctttctcctgagcagcaggcctgccattgccctgtgttgtgccgcctggcacctcaccccgcttggagcagttccttacagctcacttctgtcctcccagctgtaatggaagcgtttctcccatgagacacagaacagttggcttttggacatctagacctacttttcaagctgaactgcttggagatagtctcaggaatctgctggttctacaaacacttctaaagtttgcattttcacttagatctaaaaaaaaaaaccttccaattataaagactgaacgtttggctgggcgcggtggctcacgtctgtaatcccagcactttgggaggccgaggcaggtggatcacctgaggtcaggagttcgagaccagcctggccaacgtggtgaaaccctgtctctactaaaaatacaaaaatcagatgggcgtggtggtgcacacctgtaatcccagctacttgggaggctggggcaggagaattgctcaaacctgggaggtggaggttgcagtgagctgagattgcgccactgcacagcagatccagactgtgtctcaaaaaaaaaaaaaaaaaaaaaaaaaacaaacctaaagtttgcagtgatcactccaaattaagagatgttcctatagggtaaataggtaaggcctgaagtcagcactgcatacgcagcccatggggccactggggttgggggtctgtgagcagattctcgggagtcttgcgagaacagctttcacgatgaaagagctgtacgttatgtttgaacgatgctgatctctagaccattttccagtgccattctcagttactgccagctgttgatgaggttgttattggtccgtaatgcaatgaaaagtgatgatacttgctgtaccgacgtcagatggacgtagagcacgtgcaggccacattttgagaaatgctgagctcacccagccctccactgacctcatcgcacagaggtggagcagaggaccggggaggagaaggctgccgggctggctgtgatggacccgggaccgtggcaagctgggagttgccaggttcatttctcccagcctttgagggactgtgatagttcatgccttggtctgacctgacccctagtggcaggaggggccacagctatccctggcagtctttgtggccccgcagtacctgcagggaggtacctgtaagccggtccccctagcagtgccagtgatggcaggtggagcacagcagggccccgccaagaatccttggtctttggcgtctttgccccctccttttcctcctgatggggagttgtgatgtcaggatggccccgctgttttgggggtccacgagagagctcaggccttgtgcttggccctgctccactcctgggtcggagtcatggtctcttggagcagagttggcatctgtcttgcatttgccccgctagagggacagaagacccggtgctgactcctcacacttacccagcctgccgcctcctcacacttaccttgctgactccggcggctgcaccaggactaattgaggagccagtgtcctccctgacaccagcctctgagtttttcttttcttttcttttctttttttttttttttttttttggtgggagccttgaaaattcgtggtttctaatcatccttcagtcatccaccagttgaattgtattttcaacctggaccagtttttaatatacagggacccttttatctggagcccagggttctgggtttggatcctggctctatctcttacctgctatgtgggcttgggcaataatttacccttcagaactttttctgtccaatgcctgtcctctctgcatctcagaattgtagagattcaatagatcttgtatgtgaagctcatgagaccagatactgttacacaggagttactatttcccacatggaatcctttctgggaaagagacagggaggaatacaatcacgtgtcactcaacgacgggaaatacgtcctgagaaatgacgggaatacgtcctacgacacacgtcggctatagagcccgtggctgccagcacagacctggatggtctagcctaggacacacgtcggctatagagcgtgtggctgccagcacagacctggatggtctagcctaggacacacgttggctatagggcgcgtggctgccagcacagacctggatggtcgagcctaggacacacgtcggctatagagcctgtggctgccaggttacaaagctgtgcagcaggttcctttactgaatattgtaggtaattgtaacacaaagacaggcatttgtatactaaacatctaaatatggaaaaggtacagtaaaaatatagtattagaatcttaataggaccagtgtcatctatgcagtctgttgactgcagtgtcattgtgtggtgctggactggattgcagaatataaatgattagtttggaatgtcatgattgatgatggtgttgtcaacgcacaagggcaccaagagaatgtaaagatgctgattttttttttttttttttttttttgagacagtctcgttctgtcacccaggctggagtgcagtggtgcgatctcggctcactgcaaccccagcctcctggattcaagcaattcttctgcctcagcctgccgagtagctgggattataggcacacaccaccatgcctggctaatttttgtattttttacaaaaattagagatggggtttcaccatgttggccaggttggtctcgaactcctgacctcaggtgatccacgtgcctccacttcccaaagtgttgggattacaggcgtgagccatcgcccctggccgagatgctgagatttatggagcacttaactcattcatggaacctggctgcggccaggcttggtggctcactttgggaggccaaagcaggaggcttactggagcccaggagtttgagaccagcctgggcaacacaggaagaacctgtctctatttatttatttattttaaaaaaggaagctcgccgctcctccagggacacctcagtgtgccaccacccctgtcctgccctcagttgttcaaagggtacatggctttatgatgcttgcgtgacggggtaaatagaacgcgctgactgttttaaccatgcggtaggaaaactgttgctaggtgaccctgttctatggtatagagagggagtgagagatgtccctccaggggcatctttgactcagataagagatgcccgatcaaatcaggggtatgaagctggtgggctacacacctcactgtcagtagctcatctagggggctgtccggtttacaaatggccctcctgagtctgcatcccttgtcaggatagaaaagcaggcaggatggggttctttgcccttcccaagcttggagaaatcctgacgtccagagagcccagggagacctgttgtttgggtcaggagcagcagccctgccattttcttgggaccactttgctgtagacccagctcttcctaagatgactcaaggctgggcgtggtggctcacgcttgtaatcccagcactttgggaggctgaggcaggtggatcacgaggtcaggagttcaagaccagcctggccaacacagtgaaccgccatctctactaaaaatacaaaaattagccaggcatggttgcgggcgcctgtagtcccagctactcgggaggctgaggcaggagaatctcttgaacctgggaagcggaggatgctgtgagctgagatcgtgccacacgctgtactccagcctgggtgacagagctagactctgtctcagaaaaaaaaaaagatggctcaaaagaggaagggaggttgtccacatgagaccatctgtaggttacacatggggtgtgtgagccaacacagttgtacaggtgtgcacaggtgtgaatccagaggggaaggggagcggggcccacaccttagtccttctgcatcagctttctgaagctggagttctgagagcagcctccctcgactagctcacactacgataaggaaaattcatgagctggtgtccaaggagggctgggtgactcgtggctcagtcagcatcaagattcctttcgtctttcccctctgccctccctggcttgtcagctttgtccctcaggcttggcccctcgtggccctaagatcattgtcatggttttgtctgctgacaaaacactgctgacatgttaaatcttttttgggaatcattgagaaaacctttccccagcgcacccagtggatatgccctcctctgccactggcaagaggataggctaactgactgccttaggcagatcatgacttaatcctgcgtcccatggaggaggaggacacgtttggctagaacctggctctgccagtggggagctcagggagcagaggtgttgatacttgtatgtgaacaacagataatattcgtgtccaggagtctttgcccttgcagaagcctggacaactgattaatccagaaggagcaccccacaggctctgggtctttcagcatcgcccaatgtgaggaatatgtcttgggcattcctcagaggcagaggccatgtcctacacatctcgactttcctgctgcgggtctcccagttcctggcacagtgctaggcacgtgagcagcctgcagcaggtgcttgttattaaccgtaagagtagccacacttatcagatcattacgatgtgctgggctgtctcctcagagccctgtgtgtattctcacaactactctgtggtgtagacaccaacatctctttcactctaagtctcagagaagctgggtcacctgcccggggttactcagctaatgcgtgctggagtagagggcccagaagcccagatacaaatcctggcagtgaaaccctaaagcctccatgcttttgactgctgagttgcattcctgcccggccagatccagtgactgatggaatgatcaaagggttactggagagaaccttctcttcctagaattctcacaccatctttgaaggcctttggagccagagagagcatcatccagggggcagccagagtcccctgggacttcttttgtcaggaaatccccccctgaggtggagccgagctctgcttcaacacagcactctgaggggtggttgtgccttcccgggtccatccctcccgtggctgagtaatcttggtttttagctgttctcactctcacatgtactttgacaaagccttgacctccctggtggtcctctcctgggtacttcaccatttgccagtgtgccccttgctcctgggtggcctgagcagctccgtgccccccgagaccctgcacttctgccaggctgagggtgcatctctttcagcacctccatcagaccaggggccgtaacaaaggcggatctgaagcccctgcaagtgggaggggcggctcagtgcatggattgatgcacagatgagtaagagaccctcacacacttgcacccatggccagcatattccaagttgcccagagcacactttgggatacaatccagtgtttattacagatggaggctcagttttctggaaaagagtcaacttgtggtcagacacctgagtgtgttgaatccccaccacgatgctgggtgtgaaacatagaattcccattttacagatgaggaagctgtagcttagagaggttagtaactaggtcagtgtcgcacaggcttggcgagctccaagcctcattttccttacctgtaagatgaagataataacctttgtccaccgtgcaggggagctggggcgctgacccctcagattccctccagccggggctgtgccttgcctccacccatgcccagagtgtggggcagaatatggaaacatcctctgtaagctggagtaactagtatgggcctctgtgaccgtgtgtgtgtgtgtgtgtgtgtgtgtgtgtgtatgtgtgcacgcatacgtgtgctgagggctgtgtctacagaccccacgaggagggcagagtcatccggagagcccgggtgctgattctcaggcccttgttctctccccgtagagggccatccgcgtacgcagccactccatggagaccatggtgggcggccagaagaagtcgcacagtgggggcatccctggcagcctcagcgggggcatctcccacaacagcatggaggtcaccaagaccaccttctcggtgagtgctggcaggccccggggcggcaagtgggtcccagggaggccccccccagacctatggaggaagagtgcccccacccaggcttgggcaggtgacttgatcagggcaagctggatgatggtgggaaactgaggctgcttgggggtgaccctgacccctgacctctgaaaacggtcctttggagcctccatcctagacagcacccggggttgacccagatggtgctagaagccctcctgtcctgttctcttgagtttccttgacagctagacctcctcctcggggccagccctgcagtgtggtcctggggtgtgttttgctgctcaggggctcgggacccatgactgtgagaggggtgtccttgctttgttattattaatggcagcagtagccaccccagcttactgtgtaccaggcactgagctgagtaacctgtagacacaatctcacctgcttcccatagcagctgcccgagatgggtgctgatgtgttctcctgttcccatttgaggaaaaggaggcccgctggggctcagtaacttgctagaggccactcagctaagcttaagagctgggatttgaggccgggcgtggtggctcatgcctggaatcccagcactttgggaggctgaggcaggtggaccacaaggtcaggagttcaagaccagcctggccaacttggtgaaaccccgtctctactaaaaatacaaaaattaactgggcgtggtggcgggtgcctgtaatcccagctactcaggaggctgaggcagagaattgcttgaacctgggaggtggaacttgcagtgagccgagatcatgccactgcactccagcctgggtgacagcgagactgtctcaaaaaaacaaaacaaaacaaaacacaaaatcaactgaatttgaatgcgattctgctggatccaaagtctgtgctgttcatcaccatgtgtacagttcccaagggaagggtcctgcaggcctgtgagtttgggcctgattgactcgtaccaggggctgggaaggggagggaatcatgtagttgggcctttcataaagcaaagtgggccgggcatggtggctgaggagggtggatcccttgagtccaggaattcgagaccagcttggggaacaaagtgagaccccatctctacaaaaaaatgcaaaaattagctgagcatggtggcacgcaccagtagtcttagctacttgggagactgaggtgggaggatcacctgtgcctggggaggttgaggctctagcgagccgtaattgggccactgcactccagcctggatgtcagagtgagaccctgtctccaaatctaagtaactaaagcaaagtggctttggatttgtatagactaggattttcctttcttttccttcaaaatagcagaacatactcaccatggaactaattatgagtattataaatggcctcgcataattaatttaattgactaaatattttcctagctattatcttgcttccccctgaaggtgcatggcgtgagcagagcagggcctcatctccatcctgtggatgaggagactcaggtcgggtctcattgctctcctgaggtgccataacatgtgcatggcaggagctggggcctgagttggaggcttggtggcctctagaggttggttccaggctcccatctgccctcctcaaacccccaccactcattgtccactgtgaggccaggcagctttccaaagcagaaggcgtcttggctgccgccaaccgcccattggtgcctgtggccctggctctgcggctctcagcctgtcttgttattggaacgcctgcgcggctccatttgtttgcgaggaatgaaggagagtcaggagtcctcaccctgccagtgatttgctggaagacctttggtcttcagcttccttgccggtaaagtgagaggttgaaccaggtccctccagggcctccctggctctgtgcctctcagcctgtgtcccccggaattgttctgaccttctcaatttggtgggcctggccctgtgttcctccaacagttgtggtctttggtggatcatgacctgggaccacaaggtttggcttaacacagggaaggaggctgtgactggcctgagtctccaggtctcagcttcagttacatagatctcaaccttcctagctgtcttgctattttctggggtctcttccagaccaggagccatttgtagaccagggaggaggatgaggggataggagatcggtgtttgggccgggagcactcattttggcaatttcatcgacagcctccagtggtggcggcaacggtgaagaaccagtcacggagtcccatcaagcgacgctcggggctcttcccccgcctgcacacgggctcagaaggccagggcgacagccgggcacgatggtaactgttgggaaacccctaccccagcctgacttgcggggtctgtcaaccccctccactgctacagctgttcagtgccctaccttgcagggaggagctttgctcagctttaggagatggctctgccttcaggcacctgtgtgtcccctgtcactcactcagctctttatccaaagaggcggacttggccagtctctgcctgggaccttccagagttactcttgccgcattttgacccaggctagaaacattgcttggattcttgtttctttgcctcctttttcaacgctcactcaaatggcctgtcttatgggagccttccctgattctgccaggcagagttagttgcaccttcctctgggcttctaaaaggttctatgcttttttctttttaagcaactcatatattacattacattgaacctgttcttggtaattgtctttctgattcttttaaaaaaatgaacacacagtacttgtgcatatttttggggtacgtgtgatattttgataaaatgcataatgatcaaatcaaggtaagagaaatatccatcacctcaaacattgatcttttgagttaggaacattcaaattcttttctagctattttgagctatgtaatacattattatcaactatagtcactgtattgtactattgaacactagatcttatttcttctatctaactgtatttttgtacccattaaccaacctcccttcatcctgccctcccccgccccttcccagcctctggtgacaccagtcaactttctatctccacgagattcacttttttagctcccacatatgaatgagaacatgcgatatttgtcttttttttttttttttttttttttttgagacagagtctctgttgcccaggctggaatgcagtggcgccatcttggctcactgcaacctctgcctcctgggttcaagcagttctcctgtctcagcctccctgagcagctgggactacaggcgcatgccaccacaccggctaatttttgtaattttggtagagacggggttttgccatgttggccaggctagtctcgaactcctgacctcaagtgatccacccgccttggcctcccaaagtgttgggattacaggcgtgagccaccgcacccggccacggtatttgtcttttcatgtctggctttcacttaacataatgacctccaattctacccatgttgctgcaaatgacaggattacattcttttccatgggtgaataatatccattgtgtatataaaaaagattttccttatccgcttatctgttgatggacactcaggtgggttctgtaccatggctattgtgagtagtgctgcaataaacatgggagtgcagacctcttccatgtactgatttcctttcttttggatatatttaccctgcagggggattgctagatcatatggtagctctagttttagtgttttgaggaacctccaaacactgtagtgtctgtagtggctatgctaatttacattcccaccaacactgtgagcatttccctttctctgcatcctcaccagcattctcaattgcctgtctttttgataaaagccattttaactggggtgagatgatagcttattgtggttcccgtggtgggggcagatgtcacagactccaaattattaaagacaaataataacagatgtcaggatatggagaaatgggaaccctttttcattgctggtgggaatgtaaaatagtgcaactactttggaaaacagtctggcagttccttagaaggttaaacatagagttaccatattaccaagcaattccgctcctcggtatatacccaagagagttgagaacggttgtctgtgaaaaaaagtttacatttacatttctttgataattaatgatgttgaatgttttttgatatacttgtttgctatttgtatgtcttcttttgagaaatttctattcatgtttcttgcccttaaaaaaatcacattatttgtgtttttgctattgatttttttgagttcctcatatattcaggttattaatccttgttggatggatagtttgcaaatatttcctcccattctgcagattggctctttacttggttgattgtttcctttggtgtgcagaagctttttaacttgatgtaatcccatttgtctatttttgcttttgttgtctgtggttttgaggtctcatctaaaaagtttttgcccagacagaccaacgtcctaaagcatttccccaatgttttcttttaggagtttctttgtttcatgccttagatttaatccattttgatttgatttttatgtatggtgagagagaagggtctggttttattcttctgtatatggttatccagttttaccagcaccacttactgaagaatgtatattcttggcacctttgttgaaaatgaaatgatcatgtggtttttgttctgtatggttaatgtgatgtatcacatttgttgatttgtggatgttgaaccatccttgcatccctggaacaaatcccatggtgaattgatcatggtgaatgatctttttgatgcattgttgaattctgtttgataatattttgttgaggatttttgcatctgtgtttatcaggagtactggcctgtaactctctttttgttgtatccttgtatggttttgatgtctttctgattctttaattgatgagcccatttgttctttatttcagcagccagcatttcttgagtggctgccatgtgctgggcacagtgctgaatgctcagacaagtgctacaaaacatataagcctgtcctccagaagttcacagtcttgtaagggaaagggcggcatttggttgacttccaaattcccaggttttctgcctatagccctgggtggtggcaccatgttctgaagtagggcttgcaggacaagaggcagggttatggagaaggatgaaaagctctgtttggaacctgtgcatgggagtttttgtgaaccaacagtagagatgtccagggagtggtcagagttacaggtttttaaaaatttttattttacttttttcttttattattatactttaagttctggaatataagtgcagaatgtgcaggtttgttacataggtatacatgtgccatggtggtttgctgcacccatcaacccgtcatctaggttttaagccctgcatgcattaggtatgtgtcctaatgctttccctccccttacccccaaccccccgacaggccctggtgtgtgatgttcccctccctgtgtccacatattctcattgttcaactcccacttatgagcgagaacatgtggtgtttggttttctgttcctgtgttagtttgctgaggatgatggttttcagcttcatccatgtccctgcaaaggacatgaactcattcttttttatggctgcatagtattccatggtatatgagaggccttgaatagagaaggagagttgggaaccaatagggtagaggtactgattaacgattgcttaattaatatgaccactggagaggctcagtagagtaccacatttaagggcaggtggagaagggaaggtggtgaagctgactgggaaggaaagatgagagaagaggaggaggggatggagtctctgaagccagaggaggagaaattccaggaagggaggacatctgtgtcagacacacagagaagtccagcaaagtgagccaaacccctggacagattgacaggaggttattagcaacctcatcaaatgtgcattgagacacttcacacctctaggatggctttaatcaaaaagacaaatagtaacagatgtcagagaggatatggagaaatggaaacccttgttcattgctggtgggaatgtaaaatagtgcaactactttggaaaagagtctggcagttccttacaaggttaaacatagagttaccatatgaccaagcaattccgctcctaggtgtatacccaagagagttgagaacagtgggccatgaaaaaaaatgagtccactagtacaactagtgtacagatactcatggcagcactatttatcatagcccaaagtggaaacagtccaaatgtccattgtctgatgaatggataaacaaagcgccatctatccataaaatggaatattattgcagtaaaaaggaataaagtcctgatacaagctacaacatagacagaccttgaaaacattatgttaagaagccagacaaaaagaccataacatattatatgattctatttacatgaatgtccagaagagtacaatctacagtgatggcttcgggattgggtgggagttacagggagaggactaggaagtgattacaaatgggtccagtgtttcctttaggggtccaaaagtattctaaaatcagatggtggtgatagttgcacaactctgaataaactaaaagccattgcattgtatactttaaataggtgagttctgtggtgtgtagattctgtctcaagaacactattatttaaaaagtacattgacggccaggtgcggtggctcacgcctgtaatctcagcactctgggagcccgatacaggcagatgacttgaggtcaggagttcgagaccagcttggccaatgcaatgaaaccccatctctactaaaagtacaaaaattagctggccatggtggtatacgcctgtaatcccagctgcttgggaggctgaggcaggagaatcacttgaacctgggaggcggaggttgcagcaatccaagatcgcaccactgcactccagcctgggcaacagagcgagactcagtctcaaaaaaagtgcattgaggacacggccatcccatccccaacagccagcacagggagcactgtgggcactgtccatggtctttgttacactaaaggagaaggatattgttggctgagagtaccccttgcttcccagctcccagggcagcctcctcatgtgggaccaggagctcgtattctagtctatatgaaggatggccccccgggacttcccaggagtccatgtgtattgggtggttcctgcggtgggggcggatgtcatagactctgccatattccctgctccattccccacggggccctctcttgacccacaactccgccaggtgtgatggccagcttgggtgagagagatctgggctagaggccgtcaagccaggactcctgcttggcagctctggacttcaccatgaacctagaatagtccctgttgtagggaccgggaaaccctgtagtatgccgccatctctggggggctcaggtgggaaaggacatccaggcagtgatgccaggcgggggcgctctgaccccactgcccctcaccgtgccgagagaggctctgcctggggccgtggatggggtgggggttgagggctgtctccgcggcctcactcctcatttccattccctcagtgacagcacatccagcacacccaagaccccagatggtggacactcctctcaggagataaagtctgagacctcatccaatcccagctctccggaaatctgccccaacaaggagaagtaagagagtgagggtgggaaaggccagcttcggccacgtggagccctggaacacgccctctgcctcctggccagctgagagtggccatctcctgcctctggaactctccagaacacaaaggccgacgggtgggggcgtggggagccgccagaggtcccggggaggaccctgggggtggagggctctcgcgtgtgacccgggctggcctcacttcctattccctgcaggcccttcatgaagttgaaggaaaacggccgtgccatctcccgctcctcctccagcaccagcagcgtcagcagcactgcaggggagggcgaggccatggaggagggcgacagtggggtaggtgtgccccgtccacccttgggcaggcactctggggcgtcagccagccaccctccttgcattaaaacggcactgtggatcgaagcccatgtcagtctttgcagaggaaaggggaagaatggaaacgagaggtgggctcgttggccatcaccaccccctgggcgcagtgggtgaggggacctctctctcagagtgacatagcagcagcagagggcaggggccagacccgatggtgccctgccttggggttcctggctggagtggtgagtggccagtgccccagggggctgggtcaaaggtccttcttggagcaggatagcttggaaccagggttgaagtcagcaggaaagaaagagcaggcccaagtggggagcaggaggcagcggctgtcctgggcttttgggggctgcctcaggcctgcgtgggcgcagctgccgagggtgggctggcctcgctcaccctgcctctctcctcagggcagccagccgtccacgacctcacccttcaagcaggaggtgtttgtctacagcccgtccccgagcagcgagagccccagcctgggggcagctgccaccccgatcatcatgagccggagtcccacaggtcagtggcatctggtggtgtgtgtgacgtcaccaggagggcaggctgtgccctgtccactgttagcagggccccagccacgctgaactggccagttttcacccctcctcccagctgtgaggccctccgctctgtgcgcccgcctcttctgttcatcagccttaagatgcccaagttcctaagctcttcttacactgagagttgtgaagctgaggcagagagttgaaggccttgtgggagatcccacagcggaggagtcgggattggcagtgggaaagctgagcactttccattagcccttctccccacctgccagtgctccaacccttctccccacctgccagcgctccagggctgccagggcccgtctgtcatgtcgggggtcttgataatacaagacgggggaagggctgcagggggagggaacagcatgtggaaaggcccagaggagaggagagagcgggtattccggaactgcacgtgttcatggcagctgggttcacagagccaggcgtcagagaggccggagcgttgacaggctgggtcagccccgggccccgggtgaggattttgttctgctagcggccactgttggagtgtttgaaggttcttaagtagggaagcaccatctggagttgagaaagtccattttggctgctgcagctgctgagtgtagaatggattagtagagagcaggagcagaggggagggatggaggggaggggagaggaggggaggggagctgcggcagaagcacctcggttcaggagagatcaaggaggtaaaatgtacgggctcagtagcaggggttcagagagagcaggagtctgggcgttttggggttctgtgatccctgcagttggtcagaataggggggccagcacctgagggccgttcaggtagacctgtgcggtgggcactgctgggcgggtgctccgggtctctgccctcgtgagggcagcacaggactttgagcctgggtccaaatcctgggtctgctgcttactagacatgtcattgggcgagtcaccaagcctgtctgtgcctcagtttctccaagcagaaaatgaagggaggggaagagtcgtgtctgcctcagagggttggttgtatgaagatgaaaggagctcatgcttgtacgaggcctggaactgttaacctcggtgttggttaaagaatgggaatgagacaatagtgtagtcagcggttctgagccgggggcagtcttgctaccccatggatgtctggcaatgtctggcgacatttttaattttcacaattttggaggggtgctactggcatctagtgggcagaggtcacggaagctgataagcaatgtacaggacagccccctagccacatcagacaaataattctctgaccccaaatgacattcggttgaaaaactctagtctcaatggtagaaacacaggaagggccaacaggccttcagggtggctgaagccaaaatgttcctggggttcacacagcgaagggatgttgcaaagggaacctgcagggtcagagatgaagggaagatcgtgattccacagccagtgaccctttgcatgcgtgtttctcagtgagtggaagagttcacgtgcctcctctcattcagccccctgtggttgggcagctgcggagctgggttcaaatcctggttgtagcattgacaggtccacgtctctgagcctcagtttcctcatctgtaaaagggggtggaaatacaaattccctgattttttttcgagatggagtctcactctgccacccaggctggagtgcaatggcgcaatctcggctcactgcaacctccgcctcccaggttcaagtgattcacctgcctcagccttccaagtagctgggattacaggcatgtgccacatgcccggctaatttttttatttttagtagagacacagtttcaccatgttggccaggctggtctcgaactcctgacctcgtgatccacccacctcggcctcccaaagtgctgggattacaggcgtgagccaccgcgcctgacctggtgtttttgttttgttttgttttgttttctaaataagacttaaatattgaaggaatgaatgaaagaatctgtaagcaagcctggcccccacttggtgttaaataaacgtcaaagtaaggaaggttttgagtaaaggaattagagagtctctgcaggttgctgaaggtcaccgagggcggaagggacctggagcgggtctggtgacttatggccggtgcttcccacaccacacggtgaggctgcctcttacacaccttttctccacacagtatttaaccccgatgggctgcttttcacccccagcccacgaaagatgtgcttggtacccactggatcagggtgggcttggggggatctgggaaccggtttcatgctgtttggctgagtctggggagaggcagggtggagtggggagaggtggcctgacgtcctgacgtacagtctccataatgtcagatatctgatcatggtcatttcctacctgggcttcctggggcacagaagaggactgataggttacacagaggtgttgtagccctgggtggaactcctcgattcgaagcaccacgaaccagccagcagcttccaggaaggctgcactaagctttccataccctcggccagaggacagccagaaagtcaagtggccctcctgccagcggggcacagcgggaaatgttgacaccgggctctgccaccactcacacacacttaacggaattttattatacgatggatgtcaaacccagtgtacaaatactagataatattctttaccataagtcccatatgtccaactgattctcacagaatgcttttagtggtgtttgcttcacctttttatctgtagccaacttaaggctgcaggagatgaatgtgtgtaattctgacatgaatgtggactgatattaccatgtttgttaataagtattttatatgtatatattatatatacatatatagtatatacatataatatacatatgttatagatacacataatatacatatatgtatatattatatatacatatatattatatgttatatgtatatacatatgtataatatatattatacacacacacacacacacactcactctcatggcgcccggccatgagtattttgtattaagagaacttcattcgtcagtgacatgagtcatttccttgctgtatccgagaaaagttttcaaaccccggaaggatatttcctcagttttcttttgtgctattcacaatgtaatcgctgcagacacagcatgttttgaagtttcatgtaaattcctttttttctattagttccttaagtctagacaacaaaacaatcaatcaagtcatgatttgtagcatgtaccagtttctgtggtgtaaatacacttgtcgtggctgatctcaagctactgacgtgatgtcctcgaacgtggacttgggaagaagatatactgtagccaccatctttagggtgtttctaccacatggatacaatagacgtaagagcacagataatcgtaaaacagagaaaaataagtaggaagtgacgaatttcaagtatttattacctctgttgaatataatttattgaactgtaagcttatatataattcaactttaaaaaatggcctgagttgaacaaccagctcaccacaattctataatctaggagttggctctcgtgggtcggcacaggtcagctagggtgcctggtcctggtggagggcaggaggcccccttcccctggcctccctagccagtccccacacacagccccagtggcctccacagctccaccctcctttcatggccgttctttttcttagatgccaaaagcagaaactccccgagatcgaacctgaaattccgctttgacaagctcagccatgccagctctggtgcggtaaggatgcgcctcccacaccccacactccactttctgcagaggcccagccttccttcctgaggccagaggaagagggttcagacatcccagagggggctccccgaaggaggcaggggaagctctggggacgtctggctccagcaggtgcaggccgtgtctccgggttccagccacctttgccacaactcccaaggtggagctacacctctggacacggccaggcccagatgtgaggtgggaggtgctggttcctgggtcccccagtcccttcctgagctctccagactatcgagagctccaggcccagttgtgaggtgggaagggctggttcctgggtcccccagtcccttcctgagctcaccagactatcgagagctccaggtccagatgtgaggtggaaggtgctggttcctgggtcccccagtcccttcctgagctctccagactatcgagagctccaggtccagatgtgaggtggaaggtgctggttcctgggtcccccagtccctttctgagctcgccagactatggagaactccaggtccagatgtgaggtgggaagggctggttcctgggtcccgaatcccttcctgagctcaccagactatcaagagctccaggtccagatgtgaggtgagaaaggctggttcctgggtcccccagtccctttctgagctcgccagactatcgagaactccaggtccagatgtgaggtgggaagggctggttcctgggtcccgaatcccttcctgagctcaccagactatcgagagctccaggtccagatgtgaggtgggaagggctggttcctgggtcccccagtcccttcctgagctctccagactatcgagagctccaggtccagatgtgatgtgggaagggctggttcctgggtcccgaatcccttcctgagctcaccagactatcgagagctccaggtccagatgtgaggtggaaggtgctggttcctgggtcccccagtcccttcctgagctctccagactatcgagagctccaggcccagttgtgaggtgggaagggctggttcttgggtcccgaatcccttcctgagctcttcagactatcgagagctccaggtccagatgtgaggtgggaagggctggttcctgggtcccgaatcccttcctgagctctccagactatcgagagctccaggtccagatgtgaggtgggaagggctggttcccgggtcccccagtccctttctgagctcgccagactatcgagaactccaggtccagatgtgaggtgggaagtgcttgttcctggggtcctgaatcccttcctgagctcaccagactgttgagagctgagtgcacagagccgccgtggaagggacctgtgctgtctggttatttaaactcctgtatggatttttgttgaaacagggtcactaatgtgaaagtggagtccttcgcctgtccaaggtgggttgagtgaatgtcctgctgtggccgtgaggggggacgtgtgtttcttttagatcagggaactagaggccttgtaacctcagaatggccggagagatgccgccagctggggatgtccaaagagtctcctactcgcccctgaagacctgcaatggggaaggaggggcagatggcctgtgtgcggatgggaagggggttcccagtgacactggactagacgtactagttaggcctcccttccaccgatggggtctggttcccgcaggcagaaggggagtcgcccaagcccgcttctgacccaggagggaggagttcctgagggctcccttgctcccctgccctcaggcagctgttccctccttgtgtctttggcggaggccctgggctgaggtgtgttctccctccctgtcgggagtcagcactgtgagggaccaccccaggaggcctcttcccctgcctgctttgagggggcacgtggtttgagcagagtggccgtgggtccagctcgcccccatcaaggcctggatttctgctggggaagtcaccagagacccatctgagctcccagccctctccccacatggggcttcaggggtcagagtcacagctggagccaagaggaggggtacaaccgaacccactctgtgttcaacctgatttatgaaaaagcagaagacaaatgggcatatggaccttcacccccggctcccatcacgcactctggacgccactgcccaccaaagccgtggctatgcgcagcttctcgggccacgcaaggtggggcacccttacatcaggtgccctcctgctcctgagtgtatccagtgagctgtagccatgggcaggcgtgttccccaccccttgctcccgacgtccgcgtcgtcccctccttcctgtacggaatgttcgctcatcgccgcctcctccttgtctcctcagggaatcccctcttctgtcctggaaaaggctcctgtaccagcagtttgggagtgccgtccacgaccctgacagtcccagccctgctgccccatggccacgtgcccacagatgtgctgttggtccaggtgtcccagtctggccacagccctgcctccgccctcacctacatgccctcccagcccctcccatctctggacgaggcctccttcctcaggttcctcctgctcctgacctcccagtgtgatgtccgggtcctttatcatcctattcatcctggagaggaaaagtgtcgggcaaagggggatctggggggagctcagcagtgactggggagctggtctgcctcagagacagagtagggggtgggagcagagcctcggtgagggtcttggccacagggcagtgccttcctgaacgtggcaggctttactaccaggaacgcactcggtggtggaggccccatgttcccaggagccaagattcgtagcatccttgaggccatcctgataaaattcggcgctattgcccccgtagctctggagctctaaaccgtctatctgcttctgtgctgaacgcctttcccatctgctgacgtaggcccagggctgccctgcccctgctgccagtgtaccgtgagcggggctccagccagttcaagctcagagccagagctggacgggccagaactgcgctgcacacttcctggactgaggcggggactttgggtcccacccggtttctcctgattatggctgctgtggggtgaggggagggaggggcagccccgaggcagtctcttccctttgagaagatattttcccacaaaggggtgggaagccaggagtgagaaggaattcagggagagcaaaggagccagtgctgagatgctgctgtgttggttgaggaaaacctcgggcctgagggccaggccggagcccaggtctctgctgacaatgggggttcaaggaagacgtcgttatctcccctccccacttactcgaggagagaggtgagggggggatgacttgcgggttctgatcaggcccctgggtggggaaggggcacagtgtccctcagcagcttacgcccctggagtcttggggggcccagcctggccctggggccttttccagctactgtgcccttgggcagctgcgtctggggctcaaccccccaatcctgttcccctctccagctgcgggtctgtaggcagctgtcacatctgaagggtttctgcaacctggaccccatctgggtgtgggtcagaccctgtgacccacatgccacccccaccctccacagagcccccttgctgggacagccagctcacctccaaggacatcccctcctggcttctcccccttccgagtctgcagcgccgtgggcttctctgccgatgggcccgggttggggttaaggtgggcatcctccaggtacaacgagcctgaagagcccctttcagtgcagacggggctgcagagtgacactggctgggcacctgccccacgaccaatgacaaggatttccagctgaatgctttattcccatagggatctggacctgtgcccaagatataaatactacactttttttttttttttttaactgacattgtgaaattctccctatagcttttgccattcaagcaacattgtgatctttcttccccgccacgtgtgtgggaatgattgagtcctgtttgcaagctggagaggagctctccctttgctagtactttctctaaagtactagtctagtaaaatttattcttgttagaaggtcaacaaaatatctgtttagcttttatgaagagtcaccgtagcagcccccacggctggaaagaggcctgtacgttctggacgcgttttgttggctgggcttctggaggcactggcaaggtcaaactgcatttctttaagaacagttgcaggatctggctcgcctctgtgggaagccggcattacaggtgcttggtggatgggccgtgtcacattgccatctggggtcctttggggtttccaggttgtcaccatgctgtcccatttgggaatcccatacctgcctgtccccactgcgctggctgacccttgctgcctgctgcctcttgggagggctttgtccctgcctctgagctggtgggcaggatggctgggtggcccccagagaagcacagacctgagatggggtctccatgcccggtttgctgttggaatgatctgaacaggaccccaaatgcctcttccctctggtcatgcctcactatctctaggagctccatcctgtggcttccagagtgtgcacttccagcccacccgggcagtgctgagagggaggaggagaacaaggatggcccagcctcccctccctcccctagaccacggggcgggcagctcgggttcctggagggctgtttcccccacgctgtccctacatctgctctgatctaaaatgtctttccttttatgctgcgcccagtcttggggctcaaagatttgcccaaacctcattggccctcgtgactaggctcatctagatggtgctcacgctggtgtttgaggcatttccactgtgatctccacgaggggatgttttccgggacacatctctggctctgggaactgcctgactcactgaagaaactacttttcaggcactgtagggtcacccatatgcctccagctcagttgacgcttaaaaacaggtgcagaaaagctcgcgatggaaggtcttaatgagagtgtctgtctatgccaatcatgtaaaatgacgtttcttgaaaaagattcagtggttcagctttgtcagcatcatctcaacacaagcctgctggctctttttagcatctcatccaaccatgtcatcgtccagatgagaaatcttagcccaggtgaggggagtaacttgcttgaggtcacacagctggctgttggcaaagctgggattagaaccctcaacccagggtcccttcctctgcagcgcctacatggttggttgaataagtggctgcgtttcctggggccctgggttttggggaagccagttagctgctgctttggcactggcatggaggtgagcagtcaaggatgctggtgaggctgcagtttctgctctttttcatcaggggggatagtctctaggatttttcagtgaggacccttgggctttggatgcagcttgaaccaagaaaacgaggagggaaagggattcagtgaactattcctcagtgggatcggttcttcagctcctgatgggggctgtgtaatgggggcagaggccagggaaaaagatgctgttcacccaccctcagcttcccttttcctaaattaagaggaaaagtggtcaaagaaaaactcttcatttctccctgattcttaaacgaaggtggttaatagaaactcaggctcccgtgacaaggcaggacaagagcctgtttcgctttcctccctgaccctgccaggtgccaactcaaacactacctttctcattggtttctaagtcagtagagacagatctgttttaagcagttgggggttcgagtagatctcatgggtacaggaggccagcagggaccaggccagtcagccatgctcaggacccctcggctcctcccccagcctctagctaccctgtatcgaggcaaggggaggccagtaaagtttgccaagcctgatcctgcagcctggtggggctggctggggtattcttttaccaaactctgttttaccgccagccccttgtacaccccaatcccatgtctccctcccttcagctggaccgtgtgcccctttgggaggaagaagacaagccccactagggccaagggcagcagagccctgccgagtgagaggctgtggggcagcggctctgtcctgtgccttaccagccctggggaggggggcatttggctggaagactggaatttaattgccatcgtctttgattttgtgacatttctgcttggaagtgtgaactacccccccccccccgcttcctgctccttagcatgcgtgcagctctctcctgttttgggtgttccccttggacactccagctcggggactgctggcgtgtgaatgtgcagattcccctgtgtggtcgaacctaagaactgtggcttggaagtgatgctccatgtgacgacgactttgctttctttcctcttagtgaggaggtgattcgtagatcccaactgcctatgtaatgtaaataatgtacatttaatttattgctatggtagcacattgtatttgttaatgtacaaaacaaattctaaaaggttgacaaatgtatattttgttgcttaaatgtgtctttgcagaaattgacaataaataacatattttgtgtccatcagtgttcagagttctttgcatggggccctgggcctgggggtcactgttcagttcactggaagttgcatattctctggccaatagatgtgttactttagtctgagatgtatttttaaacatttacattaattgttgatgtttaaaaaactgacgacaattagaaaagtggccgggcgtggtagctcccacccagaatcctaacattttgggaggctgaggcaggaggatctcttcagcctaagggtttgagaccagactgggcaacatagtgaggcccgatgtgtaccaaaaaaaaaaaaaaaaaaaaaacaaaaaacaaccaaaaccccaaaaaacccctaaaaaattagctgggcaggtggcacgtacctgtggtcccaggtactcaggaggctgagatgggaggatcacttgagcctgggaagtcaaggctgcagtgatctgtgattgcagcggtgcacaccagcctgggcgacagtgatactgtgtttcaaaacaacaacagcaacaaaaaagctctgcgcagtggctcacgcctgtaattccagcactttgggaggctgaggtgggcggatcacttcaggtcaggctttcgagaccagcctggccaacatagtgaaaccctgtctctactaaaaacacaaaatttagccaggtgtggtggcaggcacctgtaatcccagctactcaggaggcaggagaatctcttgaactcgggaggcggaggttgcagtgagccaagattgcgccactgcactccagccagggcgacacagagcaagactctgcctcaaaaaaaaaaaaaaaaaaaaaaaaagaaattttacataaatcccaaattctgctgcttttaaaaaatcagggccgggcgtggtgtctcatgcctgtaatcccagcactttgggaggccgaggtgggcggatcacgaggtcaggagatcaagactatcctggctaacatggtgaaaacccatctctgctaaaaatacaaaaaaaaagtagccgggcgtggtggcaggtgcctgtagtcccagctactcgggaggctgaggcaggagaatcacttgaacctgggaggcagaggttgcagtgagccaagatcgtgccactgcactccagcctgggtgacagagggagactctgtctcgggaaataaataaataaataaataaataaataaaaatcagatgctgaatctactcctcaggcatgagttggttagagttcactggaatctttcccttttgactgggaccttgagtgtcccacagtctccaccgtcccctactgtttacacctggaagatttcactcattcctgttatctgttggtctctgtcatggctgagtttgagagcctggctgttcagtgattcgtgtccatcctgcggtgttctccctctgcctgcttctcagattcctcactcactccttccaggtttccctcacggttgcatgctctctcttcccgtcctcctctgactcctgaatggccctgttctcacatacactttgctttacactgcttggctgtacagcttgaagtaatatctgcattttttttttcctgaataaatttgaaggcaaggaacaggtgtttaagaatctgctgatcgagcgcggtggctcatgcctgtaatcccagcactttggaaggctgaggcgggcggatcacttgaggtcaagagttcaagaccagcctggccaacatggtgaaaccccgtctctactaaaaatacaaaaattagctgggcctggtggcaggtgcctgtaatactagctactcgggaggttgagctgcaagaatcacctgaacctgggaggcagaggttgcagtgagctgaaatcttgccattgcactccagcccgggtgacagagcgagactccatctcaaaaaaaaaaaaaaaaaaaaaaaagattccgccatgacttccttttgtggtcttgggcaaattcattaactccccatgatttgcattttcttttgtgtataattagaacaataattcacatagctagcatgaggagaaaaatgaatttattgggaaagagctttgagaaatggcaagtgttatgcaagcaccagaggttcgataataataataatacgagcaactgacactgaaagctcaccatatgctcggtgttttccctgggttgtcagttctgttatcacacaacatggcacttcctaaacatacaccatgggagatggtgcaaccacagggcttatggcaaacaatggggttagggacgtaacactcaaacactttgtcagtgacgtaaaaataaaaagacaggaacttgataacaattttacacgtgttaaatgattgagaaatacataagggctacaataaaggcagtttagctttaataagatgggaagtttgcttgtggaatcggttgttggcaggttgtgaagcggtggaaagagagcttttctgaaattggatggacagtaacagcagaggtggatgggtatggcccccggcacatggtgtattgaggcagctggcagatgttggaggtgtatgtgtattttgtgtgtccctgtgcagcttgatttagctggctgccggttttggcactcacctaatatttctcatggatgaggagcgtaagctaaagggcaacttccatgatactccgattgtttcctattatatcaactacattggactccatttccattttcaacacaactgccgtagcagaactcactttttttttttttttttgagatggagtctcactctgtcgcccaggctggagtgcagtggcacaatctcagctcactgcaacctctgcctcccaggttcaagcaattctcctgcctcagcctccccggtagctgggactacaggcatgtgccaccacgcccagctaattttttgtatttttagtagagacggggttttaccaagttggccaggctggtctcgaactcctgacctcaggtaatccgcctgcctcggcctcccaaagcactgggatgacaggtgtgagccactgccccagcccagaactcacaatgatcatctaatttagtcatctgaaaagcccacgaaggcatgtattattcccgtttcacttaagggatcagtttcaaatttcagtttgggatccaaatctcatatgctgagctcaatatgaaaggaagttccagacttggaaggttctagatgcacagaaatgtatcaggaaaagtgcatcctggctctctctggtttccctgcccagcttggagcccctgtcctggaacccatgtgtccagcatcccacgcttctgccatcatgctgtgccaagtggtgcctgtctgagcccacggttacagatgtcttatttctcgggtgttagattccacctgttgagtccccttggctgcaagtcaagcttcatctttcacacaaactctctgtgcccatctgtacctcacggttcggctgcttcctgggttcaacccttcctcccagaaaatgtgaggttacctatatctggacactttgtggaggtggaacatgtcctgtctctgtgggaaatgtaggaggcatggaagtcatcagctatgctggtcggtattgtccctccaagcctgcaggctctcctagggttctgaaagctccctgatcggtctaggtgtctgtggtcaggtgttctttctcccgaggtgggcacgcctccaggttggggctcagttttaggactcttaaaatctgttttttccactcagcgtctaacagcttgtagcagtcactggacattttgggggtgggggtgggggtgggggcactgttttgcctgctccgtgggggaaaagctttcatgaggagtctggtcagcccgcgctcagattttccctcagtctcgtttttggagtgctccctgtgtccagccatgccctctcccacatgcgctctgaccaaccttcggtgtcccctggttctattctaacaacaacattgcggtccagttccctaagcttgcagtgatcctcagttaatacaacagttattacaacagtctcttgtgtgttcagacgcagccctgtttgtggtaaacttcacattccacgcaaagcccttctcacccatttcctggggtgggcaagcctggtgggtacagatcttggcttgggacgtggcaaagacgccctccttgaccgtacttcagtcaggatcctctggccgtctcttcaatgaggcctcacactcgacctgtccttggtttgccaaggcagttttagcaaagaatcttataaaccagtgtgaatatcgccctgcccttgatatttgatcaagttgctcgtcccccacccttgatacctaggctcctcttagtaatttcccatctaaggaaactcctcactctgcccatcggctataaatctgcaactgtccctgacgtgtcaaagttgagttcagtctttgtcccctttgcagtagtcttgagtaaaatcttccttgcctatttaactctgtctggtgtgatttttctttgacaaatggctggtcagttctcacaccagtgcccctctttgtcctggtgtggtagggtggggtgcagaagggccaaaggggcatctcattttgatactgccccaggggagagcgctggtgagtctggggagtctgagaagcagacaccaagacagcgtcaacaaattattaggagaagggcctgtgagtgaaaacggaggaggtgggatatggaggaggctggaaaagctgtcaggctgtgatgcaggtctgaccctgcacggaggagagatgggagtgagggaggttgcgtgaaggcctcttagatggggtgcagttctaaggaaagttcagggctgggcacggtggctcacgcctgtaatcccagcactttgggaggccgagacgggtggatcacaaggtcaagagttcaagaccagcatggccaagatggtgaaaccccgtctctactaaaaatacaaaaattagctgggcgtggtggcgggagcctgtaatcccagctactcgggaggctgaggcagagaattgcttgaacccaggaggtggaggttgcagtgagccgagatcgcaccactgcactccagcctgggtgacagagcgagactctatctcagaaaagaaaaaaaaaaaaaaaaaaaaaaaaggatgagttgatgagtgactccatcgagtgaaataataacacaaagcagctcatatcaaaggactaataaaaacaaactgcaacataaccagctccacataaaaatgtacaaatgaatgatcatacacacaccagtgaggctgtactaggaaaggcacagacacttcataagaaagatggtagaacgcttgctcaaattattgggtcaaatgaattttatggatcctcctgcaagacattccattaaaaaattaaatattagaccagcaaggaagtctttatggccttgttctaaaatgccgattgttgggttttataagaacttatcactagtaagaaatatgaggaaaaatccagggaatatggacaatggggtccagataaaatccaactatgccactgaaagtgcaatagtgaatataatggaaacgattttaccttttttagttacagaattttccactaagaaagagagtttctaaaactaggaaggataaaactctagcagagacaaacaactgtaacctactacaaggactcagcaatgttaatgttatctgagattttaatttagtgacattttattgccagctagtattaactacgatgactttgttgcaggggttgaacccagttcaaactactttaagccaaaaaggggagcatttgttaaaaagatacaggagtgtctcctggaatcaaaggacagggatgcatctgtgccacatgaaggacagcaaaggttgtcagccctcaggcagtctcttgcctctgctttctgttttttttttttttggcttctgcttttttctctgtgcttctctgtatttattttctttctattgggttgttggcattgtctttatggatttgggatgactttttgtgtagctttattctttccttgaggaccagctgagctgatctcagcaccagattttcccttcactgtctggactgtgaaaatggatctgggcccttcaatatgtttcctttgtcagcggcaccgtgttgcgctttgtcagtagagggcgccagagagacactgcaggagggacagagttttatctcccggttctcccgtgcttgcttggcaacctcttaattcccacttggctcttgtagcacatgctgcatctgggggtctggttcctgcagggtgggcacctctgccagcaccaggttctttcagggcacacagcctttccagcacccctcccctgcccatccccagcctctccagtgcccaccccctgcagggcatgacacacagccgcgccccgtggctagctgcttctcctgccagcaactccttcctgtctgctggtccccaccacagtgccccagtggtcttgcagcacagtacctccagtgagacacctccccatgaacagagggtggattttcagtatgctttactggtgtggcaccacagcgacttttccatccagtgacccaaggccatccagggctggatcgtagcatagtcctggcggtgggggcgggcagctcttccttggatgctctatcttacccttaggggtggaggctgctccttatttccgctattcctgtatctgttagagttgtcttcgcttattagtagccaatccctcagtactccaatcccctgctaaagaattctttatatgaaaccttcctatgcaagttactgtgtggcttctctctcctgattggacccagactaacagagcagctttctcagtttctctggggagaacctttctgtatcacatgaatccacatctccctcatttaagagggagtccagggctagtgtctggttctattccagagtcccatgagggagactctgatcagcccaagagggtcaggtgatgacctcctactctgatcaactccacccagtgggctggacttgtgggtgccacagatagccctgtgggtgatggggggctgttaaagggttcttgtgagctggcacgttcccaatgggtgtctactacagaaccctgtttattaaagacaaaagtggtgtatggaaacctgggttatgctgataacctaaaatacctgaccatttcatgaacatgggaagagtagcagtgacgcgaaagtaaaaccgacattgcaaaagcttctactgacttttgtttcctgctgacttttaaaacaacatttatacaattttgtcagttgtacctcaataaaaccgaaaaaaaaattaaatggtacagcacaagaacttataagaacatttttctatgcaccagagcattttggttgaaattttttttttttaaatttcaatagcttctggggtacaagtggattttggttacatggatgaacggcatagtcatgaagtctgagagtttagtgcatccatcacccaggtagcgtacattgtaccaaatatgtagtattttctccctcaccccctctcaccctcccacttcttagtctacatagctcgttataccactctgtatgcttttgcgtacccatagcttagctcccacttataagtgagaacatatggtatttggtgttccattcctgaattacttcatttagaataatggcctccagctctatccaagttgctgcacaaaacatattttgtcctttttatatggctaagtagtattccatggttatatatactacattttcttttttttttttaaattatcctttaagttctggggtacatgtgcggaacgtgcaggtttgttacataggtatacatgtgccatggtggtttgctgcacccatcaacccgtcatctacattaggtattctactaatgctatccctcccctagccccccatcccaccgacagaccccagtgtgtgttattcccctccctgtgtccattgtttctcattgttcaactcccatttatgagtgagaacacatggtgtttggttttctgttcttacgttagtttgctgagaatgatggtttctagcttcatccatgtccctgcaaaggacatgaactcatcctttttttatggctgcatagtattccctggtgaatatgtgccacattttctttatccagtctatcattgatgggcatttgggttggttccaagtctttgctattgtgaacagtgccgcactaaacatatgtgtgcatgtgtctttatagtagaatgatttataatcctttgggtatatacccagtaatgggattgctgggtcaaatggagatcctaaaggaatcgccacactgtcttccacaatggttgaactaatttacactcctaccaacagtgtaaaagcattcctatttctacacaacctctccagcacctgttgtttcctgactttttaatgatcgccattctaagtggtgtgagatggtatctcattgtggtttttatttgcatttctgtaatgactagtgatggaattagttctcttaaccctattccctttcttcatcttcccaaaatataacagtattttgagttatgtggcagtcagtatactggtcattataatgatataaatcttgtttactataaaattaagtagaattttatgtcctttcttgtacaactttacgttttccctggaatgactaattaccttcactttaatttgccttcttcctcatatacacagtctcattttttcccttatgttctatgagggctactattttcctggtaccaaactcattggagcctgatttctttttgcttcaatttggccttgttactttctaggcctgcttagcacagctgtattccccagacttcttttttgggtaacatctgtgattttctggatcccatgaactccttgttcttgacttactcctgagttttgctggagctcaccccccagtagcttcttaaggaaggatggaagacaaatgtgttaagtcctttcacatctgaaaatgtctctattctcccctacactagatgactagtttggctggaaattctgtgttgaaaatatttatttccacagaattttgagggcatcactccgctgtcttctagcatccagagttaccattttgattcttgagcttttgtagttgatcatgtttttttttttgctgatctgttttttttttcccggaagtatttatgatccgcatatgccagcatcaaagacttaaaagatgttgtgcaggaaacaacctgttccctgcaagaccaaaggcaaatatttcattatatgcagatgttatgattgcatacttggaaacacaaagaatgtccattgaaaattattactaacaataagagaatagaatgtatatacagttgatctgaaatttgttgatatatcttggcatgagtttaaacaattgctttcattgttttggaccttcaatgattctttaaccttgatatatgtgaccttcaggttaggggcattttatgctatttctttgattttattggaaccttataattccatataaacttaagatcaagttttctagttctccaaagtctttttggaacttttcttagggtcacgataaagttttaatttagggagatttgacatttttattacatagaaacttcctattcacaaatatatctttctattatttcaagttttctttttatgtactccagtagaaatatatatatatatatatatatatatatatatatatatatatatataaaatttttttttctttgacatggagtgtcgctgtgtcgcccaggctggagtacagtggtgtgatctcggctcactgcaacctctgcctcccgggttcaagtgatcctcctgcctcagccttcagagtagctgggattacaggcgcctgccaccacactcagctaatttttgtatttttcgtagagatggggtttcgccatgttgcccaggctggtcttgaactcctgacctcaagcgatccacccgccttggcttcccaaagtgctgggattacaggcgtgagtcaccgtgcctggccagaataataaaatttttattgaatttattctcagttcttttttcttttttttgctgttattacacataggatatttttaccattatattttctgcctggttgtttgcgtacggaaatagaattaatttttgtatattgattttgcatccagccaactcatcctattctcttattgttcctaacaattttaatgggctctgtctttcaaagtatagaatcatatcacctacatatgaaaaatttgccttcgtttttccagcgaatggggtcttctttcctcaacatctctgatgctagcatgtaggatatctatagtcttctttccttttctttatttttttctgtatactcccagacaacacgttccacacacaaatatatttttcttccagagacctgactgaattctctagtttttaatgtttcttgattttcaagtataaatcatttcacctgaaataataatattttgttttcctcctgccccccagttttaaccgccttgccccctttgaagtcttatatcttgcctgggcgctccaaaacattacataaaaacggtgagagcaggggcattcgcatccagctcgactttcataggaatgcgtctggcgtttcaaacactgtgaggttcactatggttttctgagttgtcattaaattcaggtttgtttaattcctgttgactaaaaatttcattttcttttttttttttaattaccaatcaatgttacattttatcagcgcctttggtcatctaacggtctgataggccattgccattgcacagtgttcttctaacggaatttagaatcctagcttccgatgctttctcagaagaagagcacgggcggtaggaaagaaggacgctttcaggaaggatggagggcccaggacgatttcgctccccggtggacgtggagggcgggcagggtcatcctttctcctgaaactggggagccctacgaaggggttccggagaagacgcacggatctcgaatacctccccgcccggctgccactggatggcgcgcgcaacctgcggaaccacagggcgacatccagctgcgggcggcgaagggaattggagcgtggacctctccaggcttttcattcgctggttctgccggtgtcccgccttttccatctcctcattggctgtcgcctccgggcctgcgactttgctcagcccctccggggagtggaatcgggtgtgcaacaggccgtgaggtccggctttgcgaggaactcccattggtcagtcaaacaggagtcccaccctcctgggcttcccattggttgctgtcccaccgctgctctcagtttcccagcggctggggatctgggttttctgggggtggaggggtgcagtacgctgctggaagctcgtttctctttccaccgttgtgtgcctcgggctcgcggtcaacggggctggacgaggttcagaaccctccagagcggcagctgtccccggggtgggttgtgggactcaacagccctcaggggaaaatggcgggaggcaggtggaggtgtcttctttgcactgaagacctggataccctgctgcgggctgaacgggaggctggggtggagccctggctcgggttatggccggggaggagaccacgctgggcgagtgggaggcagccccagccaggggctggaagaccaagtaccggaccttcaagggccttcttgcacccgcatcccacagtaaacaggatacgtaggtgaccgtctagaaaacttgagtttctcttgacaagttgatgtgccagttttcgtatgcattcaaataaatatttagtaatttcaactttgcgcttttagcattttggagctagtaataaatattttttttctttcaggattcaagcattttatgaatccttggaaagtttataggcctgaggcacaggtgcctgtagtggctggtgcataaaactgattctgtctcccaaccatctcaaggcacacacgcactccaggttgtcatgaaatcgctgggttctgactcatgcaaaacagaccagtggctacttatacaccaggagaggctgcccagcctcgctgcagaggcccagacctgggtcctgttgaatacacatacgcagataaaaggctgaggtgacacacatcagaatgggaacagggagggctctagataataaaagtgaatgtagagtttgttttagaagccagcccaggactgggactgggtactgaggcagtggtctagtcacaagggcttgcgccaggaggcagagggcagggagagttggcaatgccacattggcaaactggcaaaagcggctccagcagtgtctcttgctccatgtttgggtcaccattctgttgctctgaactgtgaaccacaaagttaacacagagccttattgctacgtccaggtaatttgatatcgtatattctatgatctcacatggagacataaataggcttatgctgctgggccagaaaatctgtggaggaaacgatgaacatctgaaaggatacacatccaaactattaacagtggttactcatgtgatatcaaagtggacatgagaagtggaagggcgcagacttatttatttatttagacggagtcttgctctgtggcccaggctggagtgccgtggtgcgatctcagctcactgcaatctctgcctcccgggttcaagcgatttacctgcctcagcctcccgcgtagctgggattacaggcgccccccccccccaccactcccgactaatttttgtatttttagcagagtctgggtttcaccatgttggccaggctggtctcgaactcctgacctcaggtgatctgcccgcctcggcctcccaaagtgctgggaacaggcgtgagccactgctcctggccttattttttttaaaattttactgttgacaatatgctttttaaaaactaatacatatacatgaaaaaataagccatgtaaatggataattagtgataagtcagtctcctactctagcgggcgagagtcagttccagtcccctgttcccatttccagggggagcttctaagtgtcttgagcatccttcacaacatggtctatgcaaataggcacttttggatacacttcttacttttaactttctgcatatttgcattgtttgtttttgcaggcaagccgattagaaagccaattaaaaaacgtgtcaatgaatactcaataataatatgggttaagtaggatggggtttcgatttttttttcacactgaaatggcatcttaggtaccactgctgcgggtcctcaaaatatgcacttctcgtcattttcttaagagctgagatctggattctgtgtgtgtgtgtgtgtatgtgtgtgtgtgtgtgagagagagagagagattgttaggctaagaagatgtttttggctcatagctaagtgggttgcttgcctggtggtggaggaattgcaggccaggcagtgtgtcctatggccttggaatggacgagaaaggcctgggctccactgaaaatgacaagttgtttcactccacggtctctgctgcaccagagggtgcgtgtgccttcattcttcagctgctgttaaagcaaagctaggctgtgcttccgtggcagccctttccttgtattgcatttcaccttgcatgtttgtgtgagtgtagagactataatttgatatggcttctgaaggcttacagtcaggaagtggcagccacatcttgtgtcagttgactgtggcctcggtcctcttactcatccatcattcattcaacaagtatttatcaagcatttactatgtatgaaacaattgacccagatactgggaaaactggtgaacaaaaccagaatgtctaatcaggtgcatgctggctgggaagggcgagggtagatgctgagaggttctgcttttgaatgtttgatactgtgatttcccttccaaaaatacacagtgtcggcttccctcttgcaagttttacctcctaaattcctctctgatccttcctctcctttatgcttctgttactgcctcttcaggtgcttcccctcactttggccaatttagcagtctcctaactgatctccctgacttcacccttcagccctgtttcacatgcattgttgacaatgccacttaacacaaagctgggtgtgtcatttccatgcctgagacttttcatggactctctattgtctattgcatacaatccaagctccttaactagccataggggccctcaatgacattgctcacacgtgtctgtggacacatggagatgatcttcaagaacagttctcccttcaaagacagacttgctgcccagctgtgaggagtgtggtcggcagacagccttcagctgtcacctcctttagggtttaccgtagctgcagagagcctccttccccaaggcagtcccttttcctggatagcccacacctggtgattgaggcaggggtataaagactgtccattttaacctgatatgggacagctccgatggccaacagtcattccaaatctccctgctgggttggtgctacggtgtgaaagtgtcctttccaaaagtcatgcgttgaaactttatagccagtgcgatagtattatgaggtggggcctttaagaggtgattaggccacgaggctcctcccacgtgaatgggataagaccctttataaaagaggcttcatgcagtgtgtggctttcttgctctttcacctttccccatgtgaaggtgcggtgttcttgtcccccaaggggatgcagagaccaggtcctcactagctggcagcttggtttggatttcccagcctccagaactgtgagaaattattttctgttttttataaattgcacagtttcaggtattttgttatagaagcagaaaatgtgctgagataatcggctttctgggaggtcagcctgcaatttgacttcctcctctgcccaatcaatctccttcccttgttccttcacaggtgttgttccctagtaaacacttttcactccaaactctttctcatacttgcttctggagcccctggcctgtgacactgcctggatagcgtcactgccgccgctcttatttataacagactccccatcactccccgcacacaccctgtttcaaatccctgtgctttcatgtgtgctattccctttgcctcaacttttcttctcaattttttttctttggtcaacaaaatttctgtttttcctgtcccttcaaacccagctcagggaatatctcctacctggctccttgttgctgggcttggcttgcttctttgttctctccctcctccctttgcttagagagtactgctgtagttggtgggtacagtattgtatacagaagtgtatttggtacccagaagtgtatttggtacccagaagtgatggattccagagcagaaagggacccaggactacctgacatggtagttgtgattctggagcaggagctgtgatgaacacgggagagcagatatgccttcaacatactgacttcatttcctttgggtacatatctagaattgggattactgaaacatggtagcttcattttaaaaaagtaatttttttagaggcaaggtctcactcttccgcccaggctggagtgcagtcgcacagtcatagctcactgcagccttgccctcctgggctcaagagatcctcttgccttaacctccccaggagctaggactacaggtttgtgccaccatgcccagctagctttttaaattttgtgtttgtagagatggggtatcaccatgttgcccaggctggtgtcaaactcctggctgtaagtgatcctcgtgcctcatcctcctaaagtgttgggattacaggcacgagcaactgtgcccagcagtggttcgatttttagtttttaaagaacctccataccatcatccataattgttatactaatttacattcccaccaacaatgcttaaaagttaccttttctccacatcctccgatactcgtcattcatctttatggtgaaggctgttctaacaagcatgaaatgatacctcatggtgattttgatgtacatttttctaatgattagtgatgtgagcatattttcatgtacctattggccatttgtatgtcatctaaagaaacatcagttcatatatctataaagaacatcattgctattttgatatggatttttttgcctttgtagattgctttgagtaacatggacattttagtaatggtaattctttcaatccatgaacagggaatattttctcatttactattctcttttcaattttttcttcaatgttttatagtttttattttagagatctttcatctctttggttaaatgtactccaagggatctttggttttggtagctattgtaaatggtatggtttctccatttttttttcagatagttcactattcatgtatagatgtttctgtttttatgccagtaccatagtattttgattaaaattgttttataatatgttaatatgttttgaaatcagagagtgtgatgccttcagctttgttcttttggctgaagtttatttttggctattggggtcttttgtggttttatatggaatggtttgtttttgtttattaaaaattttattttaaaaaattttcaatattgagggtacatatgcaggtttgttgcatgtgtatattgcacccagccagagagcatagtaccaaataggtagtttttcaacccatgcctccctcccctcctccctcaccattagtctgcagtttctgttgttctcctgtttgtgtccatgtgtcttcaatgtttagctcccacttataagtgaaaacatgtggtatttggttttctgttcctgagttagtttgcttaggattttggccttcagctccatccatgttgttggaaaggatgtgacttccttcttttttatgactgcataatattccatggtatatataagcattttctttatccagtcaacgactgatgggcaccaaagttgaatccgtgtctttgctgttgtgaatctcattgtgatggacatatgcatatatatgtccttatggtagaatgatttatatacccggtaatggaaatgctgagtcaaatggtagttctgttgtaagttctttgagaaatctccaaactgctcttcacagttgctgaactaatttacattcccaccatcagcatataagcgttccctcccttttctccacagccttgccagcatctgctttttttggactttttattaatagccattctgactggtgtgagatggtgtctcactgtggttttgatttgcatttctctgatgattagtgatgagcattttttttcatatgtttgttgtccaatcctgtcccttcccttgagaagtgtcttttcctttgcccattttttaaatgtggttattttttgcttgtttatttaagttccttacaaatactggatattagacctttgtcagatgcacagtttgcaaatattttctcccgttctgcaggttgtctgtttactcttttgatagtttcttttgctgtgtagatgatctttaggtaattaggtcccacttttcaatagtttgacctattcttttcttatttggaggccttttatttctcttgcctgatcgctgtggctaggccttccagtactatgttgaatagggtggtgacagtgggcatccttgttttgttccaggtctcaaggggaatggctccagcttttgtccattcagtatgatgttggctgtgggtttgtcatagatggctcttattattttgaggtatgttccttggatgcctactctgttgaggagttttatcatgaagggatgctggattttaccaaaacctgtttctgtttctattgagatgatcatatggtttttgcttttaattctgtttatgtgataaatcacattgattgatttgtgtatgttgaaccagccttgcatcccaggaagtaaagttgggcaagtccagatggtcattttacaggtaattgctgacatgcagttgcctctcaacctggggaagactaatgaaagcaactgggttgtgtgggaaaggtggctcaggatttgagcctgaaaggcctatggacaatgtttcctacagcacgatgttgtcgactagtttcttctggtgtggcacctctattggccagaatacagagcaattcccaagatctgtgtgctggctactttaagtcctaccttcattctttgtttctaactgaccccaggtggtctcactctgcctgcgctctctctgtgtcccctgggatgagacaagcatgagcttgcctcctcctgcaaaggatcccagaatgaaggggaaactgagtatccgcttccaattcacttttcttattgtagaaactgtgggtctagaacattctctgtgtggtgtggtgctgactttggggcgggtgaaatggtcagggaacaatttctgttactctttgatgatggctcttctcagttgtgtggcccagggtggtgtctcagcctcagtcccaattcctggaatgttcaagatgtttttctaaaaatttgaagttccaggatacatgtgcaggatgtgcagatttgttatgtaggtaaacatgtgccatggtgttttgctgcacctgtcaacccatcactgaggtactaagccctgcatgcattagctctttatcccgattctctccctccaccgcccccactcccccaacaggacccagtgtgtgtcattcctctcccggtgtccttgtgttaggatggtattcttgattgtgggtgcttctagttggatttctgtgtgggggagtgaaagtggagaactcctattctgccatcttgcttatgtcgttctcttcttgaccaatttttaataaaaaatatatgattcagattttctatgtgtttagaggggaaagaagtattgttatggactgaatgtttgtgtccctgccaaatccgtatgtcgaagctctactgccccatgtgatagtacctttgggaggtaactgggtttagaggagctcatgatggtgagccccataatgggattagtgctcttataagaagaggaggagaccagtgcttttcctttctctcgttgcatacacaaagaagaggtcatgtgagcacacagcaagatggtggctgcctacaagctaggaagaagtcttaccagaacacaaccatgctggcatcctgatagtgactcctagcttccacaagtatgagaaaatcaatctgttgtttaagccacccagtgtatggtatttgttataacatccctaattgactaagacaaatgtgttttccacatctaatcattcatccagtttcaaacccaatggcaaaccaaagcttcagatcctttaaaaactaaaaaagtaactatgaataatttctttttttctttttcttttttttttgcttggtaaatcaactatttttattttattattttattttccataagtcgttggggtacaggtgtatttggttacatgagtaagttctttagtggagatttatgagatccttgtgcacccatcatccaagcagtatacactgcatcatatttgttgtcttttattcctcgcccccctcccagtcttctccccaagtctccaaaatccattatatcatttttatggctttgtgtcctcatagcttagctcccacatatcattgagaacacatgatctttggttttccattcttgagttacttcacttagaataatagtctccagtctcatccaggtcattgcaaatgctattaattcattcctttttatggctgagtagtattccattgtatatatgccatagtttctttacccattcgttgatcaatgggcatttgggttggttccacgattttgcatttgtgaa

SEQ ID NO: 5695 - DNA, 78236 bp, Homo sapiens
  LOC147004 gene - 28885242 - 28923477 of chr17; NCBI Entrez Gene ID: 147004; Build 35; sequence includes 20,000 bases upstream of initiation codon and 20,000 bases downstream of termination codon of the gene
ctcaggtacacagctgggaactggatgcaaacacaggtttctctggctctgaacctttgccttcatgctgcatgctctagcctaatcttgaccacctgccactcctgactcagaattttcagatgagagaactgaggccctggatttcaagggacttagctgtgcatgacacagcaaggccccaatgaactgaaatgaaatgcaccactgagaagcacacgttcatggccctgccttgctgatcctctccttcctccatctccccatcctctcttccacacccccctcaacctcatcgcggtccttgccttcctaactggtaaaattgagaaatttggggggaatgtgggaggaattaggaacaggccaaaggggaggggattgtagagggaaagcattgtttttggacaggaggccaacaagacaaatggactcctacattccgagcatttcagagccacctgtttggacttctgtcctgcccttattgatctttccagggcatttccccagtgaccaagaattacggatctttttctggaatgggatcccataccattacaatagatcatttaaggacttttatgaccgtgctgctaggaactaggattctaaagtttaaaaagatcacgtggtcttggaaaggcagccttgtctgtcctctacctcatgggctactccaccttcttccctgattcatggctttgctcactctctaaatcactgactttctcggccccttggctgtgtggccatagagaagctgctgggccttgaggagtcatcccgtgttatcccctggaagcaggacctcggtcctttctcccagatgttctttctcacctcctgccaaactccgtgccagccctcagcaccacagcctgagaagtcatgctttcttttgtactgtgtccacggatatgtgcccagcctgtcataggtgccagtaagtatttagtgaataaaggagtaaaagaatgaatggatccatcatgaattatagctgcctagctggcacttggtggatggggcaaggagggaagtgcacagggcagaggaattgctccgtcgctgttcctgaagctctggggttgggaggggatggaggaggagagcacattctgtcccaaacccctctagattcccaggacatacccatacactccagccctgcctagtctctcccaaccagccttggctggctctggatcttcctatggggcgctcaggtgggcctcagaagtagaccctgaggcagccatggacattcacagcctggtttattcagcacagctctggcaccaaactcactccatggcctatgggtatttcaggcccatgggttgaacctctctcagccctgttttcttctctgtaaaatggagatgagaatactcacgtgttctagtaggaataactcaagacacggaatgtgaagtgttagcagagtgtccagtgcctttgagtgcctctctcctcccttctatttatttttaaggctactcatcctcttccaggccttgtctgacccacggcttctgcttccttcccgcatggctggggctactggatccttagctgcaagcttagccctgcccgtggctcctaggaccaatcctgaggcttcaatagtcccagatgcccactctcggacttggcttgctattcctgtcctgacctccgtcctgttctgaagaatgcagaggccgggtgcggtggctcacgcctgtaatcctggcactttgggaggctgaggtggatggattgcttgacctcagaagtttgagaccagcctgggcaacatggcaaaacccggtctctaaaaaaaaatacaaaaattagctgggcgtggtggtgtgcgcctgtagtcccagctacttggggcgggggatggctgaagtaggagggtagcttgagttggagaggttgaggctgcagtgagccaagatcctgacactgcactccagcctgggcgacagagcaagattctgtctccaaaacaaaacaaaacaaaacaaaacaaaacaaaacaaaacaaaacaaaacaagaacgcagagcgcagtgtccagctgggtggagcccagaactgcagagatgtgctgaaagatactcccgaggccaccaccactcccacattgccttccttcttcacacacaaccagaacgtgcagtttgcatcactcacatagaaattaccaaagttattaatcacagcgtatgagtgtgtgtgtttgtatgtgtgtgtgtgtgtgagtgtgagtgtgaatgtgtgtttgtaagtgtgtttgtgagtgtgagtgtgtgtgtgtgtgtgtgtgtatggaggaggggtggtgatgctgttgttgctccttcagttacagtaatggcactcaacctaactacacattagattctcctagaaagacttgaaaatgccgatattcaggcagaagttttgatttcattggtctggagtggaccctggacattgggaattttattagtgctattaacacttccaggtaagtctagtgtgcaactggtgttgggtacaacggaacaactggtgttgggaactgatgtgagctcgctgacatcagggatttggctttatctattttgtctccttggaggtgcctggcttagtactcagtgcctgtaaatggatcaggagtccctgtctctgggacactttgcctgaccaccctcctccctcccatgcctgggctaggtgttgtgctcttattacactgggtttgatttcctgtttcctgtctgtctttttcaatagacaatggactgccctagggcaggatccagattttcatctctggctcctttgtcaaaaccctcacacatcagaatgtatcggtgccgcatgggtctgaggacatcttatcccttcttttcagggtccctggtagttaacgaagcctctcttttcttctagatgttgtttctttgctttgggaaatggttctcaaaccctcataacctctatcttagttataccttttgctgcatattattattattattttgagacagagtctcgttctgttgcccaggctggagtgcagtggcgcgatctcagctcactgcaatctctgtctcccaggttcaagtgattctcctgcctcagcctcctgcgtagctgggattacaggcatgcaccaccatgcctggctagtttttgtatgtttagtagagatggagtttcaccatgttggccaggctggtctcaaactcctgacctcaagtgatcgacccacctcggcctcccaaagtgctgggattacaggcgcgagccatggcatctggccttttgctgcgtattaaattaccctacaccttagcaatttataacaaatggtttctgtgggtcaggagttgggagtagcctagcggagtgattctagccgaggtctcttgtgaggttgcagtcaagatgccagctgggggctgcagtatttgaagacttaactggggttggagaatctactctgagggtcaatgcacacaagtgagagagcactcaagccagaggccacagtcttttaaaatgcataatacaggaaggggaacatcacacaccggggcctgttgtggggttgggggaggggggagggatagcattaggagatataccaaatgttaaatgacgagttaatgggtgcagcacaccaacatggcacatgtatacatatgtaacaaacctgcacgttgtgcacatgtaccctaaaacttaaagcataataaaaaaataaaataaaatacataataatcacttccttcataggtcgcctagaccaagcctgttgcaatgtgggtgggaactacacaaggaggaagaaccatgtgttggagtgtaacgaccgcaggctgcatgctgggagctggcctggaagtccagagagggcacccagtcctgatcccagcctctgatcatcatcctcttgaacacaaatatctatttgcccctctgatgtgcaggaacagtgcaagagatgagtgtcatcctggcctctttttgatttttttggagaagggctaatagaaaatgtcctcttggctatcagtcctgagctcctcaataacgcctgaactctgtagaaatttggaaattgaaacctaagagtaagctctagaaacagatacctccaggatgtgagcttatttttgatagccatggcgtttgaagccaatggaagtgcgggcgaaggagagactgagaaatgctgcccacgtgggctctgaaaaaggctaaggttggtggagtcccagcccctgcatgatgtggcagggggcaaggccaaacttgccatcagctggagctgacttcctgagggaggcagcaggtgcagtgggctggggcaccatgagcactaagctccatcagatctgggtgggttcctttcctgcttccatttgccgtgtggcctccaccagctgttctctccctggggcctcagtttacccatccataaaatgaattggttggactgatacactacttatgaggcttttaaaaaacaatagcaccttcattttccaaattacaccttacaacaaataaagtgaatacaatgttactgcctcattacaatatatgagataatattatgaaagctaatatgcaagaataaatgcttagtgtgttcctaaagctgttcttaaatgctttggacacattaactgatttaatcccacagtggccctgtgagataactactcttttttttttttgagatggagtctcgctctgtcacccaggctggagtacagtggcgtgatctcggctcactgcaagctccgccttccgggttcacgccattctcctgcctcagcctcccgagtagctgggactacaggcgcccgccactgcgtccagctaattttttgtattttcagtagagacggggtttcaccatgttggccaggatggtctcgatctcctgacctcgtgatccgcccgcctcggcctcccaaagtgctgggattacaggcgtgagccaccgcgccgggccgataactactctttttaatcatcatcccattttacagaggaggcagccacagcacagagaggtgaagtagcttacccaaggtcacacggcttgtaagtgacttgaactcatggagggaggccataaggccttgctcttggcccttccgttatacaaatagaagcagagcggctctggtggaagtgagggaggaatgctggaagccgcccagcttgttacccttctcctttcctctctttccactgagcacccccttaaacacagttggcctcgggcttgtggggcagcttttgagctctgacatttgacgagctatgacccccgtatttctctacctaggctttgcaaacacatgcacctgaaccatctgggatgctttattcaaatctggatttctatgccactttccaggttcatgggatcagactctctgggtagagtccaggagtctccatgttaatcagcgcacaagtgggtctcggctcactgtcatggaaaaactgctgcattttgagcaggtaggcagcttaatcaccaccactgggcttggaaaggactggatttagcactttccttagggaggaggaggaggcctccttaaggaaggtctttttaaggagagtgggaataatctctgtgcccaggcactgctagaccgtctgtcaaacttgacctcacttcaggccacccacgcaggttgctgtaaccgagagtgagccaggaacttcaactgaccaagagcaaagcctgggtcgtggtcactgtgacattccaggccacagttaatcagcacatctgtgaatgcaccaggtgatttcagaacattttttatgcttcagagagaaaacaatttttatgactgttcagtacagcccaggaatcagagaaacaaatgctgttaaacattcatgtgttaattattgccattccttgctattcctaccatccaagagctgattatgagcagagggtatctttgcaacgagaattctggcttattgtggcccctccccaggggcctctttggctgttagatttgggggagggtcattaataaatgcattgtagtcacagggtaataatcctgttgtgattagaagtatagctgttctacttgaagaaacactgtccaggcagaaaggaatgaacaaggatacgggacagaaagacagggtcagtggggaagcatgaaaatcactcgcgaattcattcttgtgtctgcacctgcagaacatacgctctttggccagtgtttgtcacagctacaccatgctctagcatttactcagaggaatacctggtccagtggttaactgggaggttgtattaattagtatgcctaactatgtccaacacacgaggagctggaaggatagtttggtgaatggccacctgggattaatcacccagtccagtacagtcgtattaatttggtgcccagcaatgttcagcacacaaggagcctcaggagggacagtttggagagagaccacgagagggcggcagtgagcccacagtctggctgatccccttacccacggacagggcccctcttggggctatgaagggtggaggagcaagtgagcggccccaaagcttaaaactttatttgcttcacagcaaatgtatccctgggcctcacctgtgttcctgtcttggagttctgagatagcagggagttctgtttctgggaatctgcctcttccccagggggaaatgacaaagggtattttgaaattgacattcaggccctggggttaagcctgtggaaccagcaggctaggggatgcttgcctcacctgcctgggtgtgtgggtgctggaatcatgttggactactttggaaaagcaaaaacttcgaagagaaggtactgatgttggcattgctggcttatggcagccaggagtctgaataataataattattattattatttcataacaggcaggcaggaattctacagacaaggttcaataacctcaaggcagtctcgtggcgaactggcagattaggtctcgggacttgggactcaggctgggctgggtccacacagcactttgcctcttgcgggagaagtagcaaataaaggcctctggagctgggtaagcaggggctcaacactgtcgtcggccaaggggtatcttttgaaggatgcaaattagctgaaattgaatgaattatttggctctgcagggggaggtgggaggtaaagagggcccctggataatgcgcctgccactcggggccagccttgctgacagttattcactctgagtgtggcacacagggacacaagaggtacagcagccatggtgactgtagggcagggatggcccagttctgatgcggccaacgcccccgaagtcctggagacagaagtagccacatgaccaaggagtcagtctctcccagtgggtacacagagcagggtgcacagcccagctggggtcccgtgagagcctgctgagagtctggcagagatgggcaaggaagatgttggatccgactggcagagctggagggactgttgagaatcttctagtctacagtgcgggtggatttgagttctgggaggggaaggaattgctcaagtcacgtaacctgatggcactgctaggactggagcccagcattcatgccccacggtcatcatctaccctcaaaggccataccttgcaaaacctcatccccgctcctcagaaccctgatgtggggcctctgaagacacctgacaagaggggacccaggctgttcctctgggtgtgcatggcaggcaggccccttcccccatcacctggcacctaggcgggcagggaggccctctggcaactgcgggcagtgtggttcagccagggctagggggccctctgctgggcagccgctgcctggcctatgggatagctgagcaaagccagctggctgggtgggttccggggctgcatagaggagcatcctgtcaggaagggtcagggatggcaaaattctgacccatggcacttctttgtcagtccccccactccttcctgtcactgctgtccctaccaggcagccttgtgccctctgctcagtaccccctcgtgggctccccaccagccccccaaacctccagtcctatctgctccccattctagctcctgctaatatgatattgaatcttaaagggtcaatgaattatttcccccgttcctgaaggcctacatttgcagagcattcggactcctctgagaaaccgagtcttccctgcaggagtgagctgaaggcccaccggctcctgctgtgggctgaggcccacctgtggggggccctgaggtgtctttgtaggggcagcggcttggcagtagttctgaccatggttggaatcctgcccctttctagttctttgactttgagcaactcactaaacttctctgaccctctgtttcctcatctgtgaaataggaacagtaattcccgtctcccagaattgccttgggtgctaagtgagaggacgcagtaaagagtccctcacaggactcagtgactatcagtttctttcattgagattttcagttttctcatctgtggaataagaattcttgtctgccctagattataactttgaaaatccaagtgttttgaaaatccaagtgttagttttatttgcggtgccatgaattcccacaagaacagacacacgagagcgccacctccagtgcagacacagacactgaagccgtgtggcatcgcaatatccctgaaaactgcctcccgctctgcaccgtgcagtcctggggctgcccagaacaaaggccagggcaacccctggctccccctaccccacccaccgcaagcccaagagagatcagcacatgatcaagccaggttgcaggaaggaaagtgatctacacagcaagtgggtgacaagaagtgtcaggacacccatcttctgagctgggcctcaatcttctttttgcagattcttctgtcttaaggaaaagacccttctcttttctcttcgttctgtgatgaaggaccctagttctgaggtcaaattccagcaatggactcactgtctttgtcatcttggtaaagtactcagcccctctgaaactttgtttcttgatttctaaaatgaggatcacaaagccatctttattttttatgtatttactttttgagatggagtctcactctgttgcccaggctggagtgcagtgacaccatctgggctcactgcaacctcctactcccagatttaagcaattctcgtgcctcagcctcccgagtagctggaattacaggcacctaccaccacatccagctaattgttttgtatttatagtagagatggagtttcaccatattgcccaggctagtctcgaactcctggcctcaagtgatccacccaccgggactcccaaagtactgggattgcaggcgtgaaccactgtgcccggctaggatcataaaacctcctgcagagggttgcttagaggtttaagtagcataatgcattcctggctcctagcacagggcttggcttctggcaggttccccttcccatgtgaacactgactcagaaaatgacactttcccgttgttataaataatctcgaagacacccagttctgtgctctgtctctgtgcttggaaaggccctctgtgctcactctaccaactagtcatctactcacggctgatgtagctccagggaggggaagctcacccttcactgggctgcaatctcagaacagctgggacggaggggaagttcctgctctcatgatgtaagtgctgtctccatgcagttctcatccatagcatagcctcaggaaattgatctaatcttgctctaaatcaactcttcggatgacccctgggccttcttgtctctttcagtcatacactcaggggtcagcctcaaccttctccagctcctctcagctttgagcaggtatctttcactttcaggagcaactcagcatgcccctgggccaatgctggtgtcctagtctggctgggctcaggagtttctctcaccatccccaggctcagcctctgagattctgcccagttcttgctaatccctgcctccaaattctttgccctccagtcagaatgtgctgatataccgttgttgggttccttatatagagacactgtgcatagaatcccctttttagccttcccagtacatcgtcagggtaagtattattattcccatttcacagaggaggaaatgaagcctctgagagattggctgacttgcccaagattgcatagccagcaaattgtgaaccagaagtgggagcttggtctctttgattggagttgagagaatgagttctccccatacaggtatgatggaaatgagaatttatgtaaaacaagaaaggtggtcttttaccagtattgtttctgtatgttctgggtgaagtgtagactcattcggaggtgtgcactgggagggggtgtcacagcttgttaggtgtatatgcatatggctaacgaggatggtggggaggtgctggcttggtgtggcagcttagctgagttgggtcatgctgctgctcacgagaatgaggtccccagtttgagtccctccacctccatccactcacctgcctcccaagtgttatttatttgtttgtttatttagagacagggtctcattatgttgcccagactggccttgaactcttgtcctcaagtgatcctcctgcctcagcctcccaagtagtagagactacaggtgcacattacagcgctgggcttcctcccagatgtatttaacttagtcataagtgagtccagctgagagtgtagacagtgcctagggagcccagcagctcccttgggaatgtgattccagggcacaggaaaggccaaaggtccttgtgaccctcaaagtctatcttcattatacctacaatatgaatcccagtctcttctgttcccccatcaccgatacctgtgtcattcctgtctctgtgctcttattcttgacgttccctctacttgggctgccttcccctcactgagtcctgtagtcagcctcagtcatgtgcatggaacaggagggcatgctggctgagttgtgtgcctacatggctagactgcgcaacacttcctagcattccctgccaccaggtctttctgagtagggcggacacgagagagtcatgtgggaggtgtggagggcagagtgaagcagcccctttgtagctcacatatcttgtcgcttagctgctggctgtttgtgtgaggctaccactccaccaccccttggaaatatctacagcttctctgcctcctggccagatgagtgagctttgttctgtgatgaaggaccctatcttctgcaggaaaccctcaccgtcaaggtcagagcaataaaactgacaggggtcttagtccaacctggtgtaattccagctcgggctcacgggttctggcttatccttgttatccctcactttatctccatcttcccctccctacctcctgccttgcagacatggagatccagcatcaaatgcaaatacctctgcattacctagacggactgaccagctcccacaatagcagaaggtcaagtgtctgtaacaaatcccttattatttatgtatcttagcagctttgcttttcttactgagcttgaattgtggtatcaacatgggtggtggctgatggtggcctatgactcctatccatcctttggagcccagctcaagactcacctcctccaggaagctttcccagaccccactagtcatcagtggtcacttctgactgagctattacagcatttactgcctgtcctgctttaggctgtaagttatctttccactcgtgggtatcttcttgtcctaggtcaaaatttcctgcacttcacagatacaaatctctagtctcttcctgaagattctgattctgcgagccttcacctagaataatatggtgaccaaaaagtgtgaggaattcagccccaagtaaactgtgagccctaagatgacaggaaccaagtccctgttttatgtgtcagggacttcacatatccagcaaaaatagtagatttgaaagtggagggtacccaaccagccttttctggagcaacatcctgtcttagaattcccattaagtgagatctctcagacgcttttctttcttcttgcagggcagcagaggatgaaaccccaagcagtcaggtgctggggacgtcattcatcctgatgatcctgatggggttaattcttactagtcatgtctccctcactctgatcaagccaccctaggactccttctcttctattgctttggaaggaggactgttctttctggctccaggagtccacctcccaatctcccagcatgtcccccggagctgagtctgacagatccaggctcttctgctttttctttggggctttctctccacttgtttctcttatacgttctagctcaaacctatgcccaacacagagtaggcactcactaagaatgggtgctggattgttcatcatcagggccaggttgcctttgctgccctcatcaggcccttatacagccagggcattggtggtactctgggcaggctatgagaccctgcttgcctagcatctgagagatggaaagtccgccaaccagacctgggctgcccaccccttctcctcccctccccagaaaaccccagattccccactgtaaacagttctgtgactgtgtctcctggaaaggccagatctgatgtccatgcaggaagctttgtaagaattcctcatggtcgaatgcatctgttccctaatcaaaacacaggcagattcctcatgctgggccttaatttgctgaacttgcacataattgagacagattatctctattttccagctagtcattttatatttcgggggtgatgctgggctggctcaggatgtttctggtcggagcccccatctgctacctgtgcaggagggctgggcgccctgtgtgcctacttccttctatgatctaacaatagagaatgcatgtggatgcctggtgcaggaaggaaggagaaatactgttcttcttcagatgtgtgtgccagggaggaggagatggacagtagggtgcactgtccagtgggcagatctaaggaaagagaatttcttacctgagtcttcaaggaaagccagaatcagggccctaaacccattcaaagaccaagcaacagctaaaggctttatgttccacactggactctcagaagtagctgaaaccaagtgactcttaccagaaaccaactctggagtagttgccttgctcgaagcctaatcaactctgggctgagaagaaaggaacacacgtggttcctttcccttccacatgaggattaaatgagatacatcagggtggcagaggagagtgctccagtgggtgaaaaatgaccaggagtggggtgttgtgtgtcccactttatggaaatcatacttggaaaaactgaatcaaaaacaacaaactctgacaaagagggtcatcgtgaacaatgggaatatcaggaatatccctttaaagagaaccccctgacacatgcatggtatctgtgggcttaccagagttgcatttacacactcattttagggacatgtgcctaaaatgaagtacatctgttaatcagggtacagagaggctgtgtggtgagggggaaagaactggatagggggtcatggagcctggttctgccactttctcactgagagacctggagcaaatcactgtcccaatccaggcctctgactcccattggacagagggtaggactggattagatgatctttaaggccactttcgctttgacattttctgtaggaagaggaggaagaagatggaacttcatggaggccctactgtattgcagatgctcatttgacccaatgccttggtaaccccaagaagaagtcatgctcaaacaattaagcaatgcatccaaggtgagaaggtgtcagggccagtaagtgtcattaccacgccctcgtaggaggtggcagggaggattcaaacctgggcctggctgacccgtgtatgtggtaggtgtgtgtgtgtgtgtgtggtttccagctgtgatcctataggacaggtgaggcagggagccagtggacttgcagtactgcttctgttttaaattgagacaaagcttggggccatcacatgggcttcctgtggggaaaaagggaggccaatccatttaattaacaccccaccagacccctggaactctccctccagccagagcaccaacaaccctgatagcaactgggctgccccaccacaaacctttaagcaattcattttctacacttataataaataagtcaatgaaaaaaattttcgacataatttccccagagaatggaagaaagaagcagcatgaattggaagctcctattatcttctgttgtcttgtctctgatgacagataatggcggctggtgaaggggattggttggcagggagaataatgcttgggtaaaggtggcctttagaatatatcatcccgcatccaactcaaaaagggaagaaaaaagcaaaagacaaggcaaggctagccgtgctgctctgttcaggcctcccttccatctacatctagccaagttgcagcccctcttactattagaaaccattgcatgaatcaccctatttgctgctgcttttcccctgtgccttcagagagctgattaattggtccaataccagcaactcgtcacgaaggtcttaattaagaaagaaatagccaccttgtgaattccctgggcatcaatagccctggggatgtctcttctgcctttctgcctgctgctcagggaatggtgaggaaaagaggacagaggcaggctccgattcaatgggattacaatattggagggagtaagagagccaagtggccaggaaactccaggacagttcaggaggaaagaataatagagagtttggccaaatgagtcagcttccaaggctgaatccaactggctgggggctcccacaaggggagtgaactttggggacatcttgggtttggactaaatttttaagactagctttaaaaaggacagttaaaagtatagcaattattttcaaccctgactgccctgtaggggagcttttaaaatacagtgatgcccgagccccacttcactccagtccaatcagaatctccagggggtaggaaccaaacactgatgtattttaagagctccctggctgattctgtggtacacctggggctgagaaccaccaaggatggtacagagcgcgtttcttcatgtgtgctccctgggccagcggcatcagcatcaacatcacctgggagcttgtcagaactgcagaatctcagacaccaccccagaactactcaagtagaatctgcaagacccctagctcattctcattcacttccaagtttgagaagcaatagtttagacaacagattgtttggggttttatttggactccagcattgaggcacattactcaacttccctgaaactcagtttcactgtatgtaaaatgggactaatgatatgtatatgccacagttatcaagagaagaagacagaatcatttctgcaaagcatttaacacagtgcttagaacagtcacttctcaatagacacacgtggttcctttcccttccacatgaggattaaatgagatacatcatgtaaggcatttaatagagtgcttgcttgtactgtgtgcttaataaatgtgggctattcttatttcctcaagcattccctaggcagacagcgggactcctgcctttgtgctcctccggctcgctactcatccatctcttccagcccttggagtattgaatttcaataagccatttttatgtctctcaaccccgctgggtcttattcagctcacttcccttggcctagtacaaagtaggtccaggaaatacatgaataaatgcgaaggccataaagcgttccttagctggagaacagagaggccgggggtcacgtgcctggggcttccaagtccttagatgtcctgtttcttggcccttgtgtaagaacgaggctctctgaaggagaaaggggccccttccagtgtctgtgagtagaaagcaggtagcaaaatatgtcatggaatattctgtgtgttgggtcaatttcaaccaacacagaacctaaatgctttgtagacctaattaaactgggagcttctagaaaaataaaaccgactttgagattgtctctagacttcctttattcctagcatgcttgggctggaaaaagaaaaagagagagaggtcagtcccctttgtctgttatgccccatggcaagcaaggggaagtcttggcagatggcagcaaggccttcctaattcatgggtcaccctggagctgcccacagacactgccagaccttttaatgaaaccacttaattggcatgaacataggcgagtgtacaggtcacctttgctcaggtcaggggctcagatgggagcatgaggccttttgggcctgcactaagcccttttttcaaggagactgtgttgctgccaggctcaagagagaggtggttggaacctaaaatactgataaacagctcatagtcctgcctagggagacagaggtaggccagctttgccaggtcatgcaggaccaacctcacaggtaccaaggggttggagactgcctctcatagctttgataaaagtcaatcatttctattagtttatgcattcactcatttaacaaaaggttttcgagttcctgctctgtgttaggtatataaagtgcttttctgtacattgttccatttgatttcatttaattagacaagaacttgctgagttagctactatcttcccattttaccagtagataagcagagccttaaataagttaaagaaaaaaatatttaacttaaaaatttttatttattaaaaattaattactaatttttaacttaatttattaacttattgactaacttagctcaaaatcacacagcttgaaggtttgaaccctagactctgtgattcaggcctcgatcagtagaaagagtttacaggcatggcctcctggacctttaaggcaaacgttccagaaaggcttaggacaagatcatagaactcctggcagaaccaggtgccaccaagaaggagtgtgctttgtttctgtagtcttggggtacataaagctgggcagggggcagggggcagtgggtgggggttacaccaaatctgagctgcctttatctgtaccgacctgacatcttgagcagaccaagccccaggcagtaaaagtgctggaaagtcaagacacgtgggcctcaatcctctctgcttcttgagaggcgttcgaccttgcagaggcccttgctcttgccatctgggggtttagggccagatggctgcccaggtctcttagaattaggttggcctgattccttgagctgtggggttggtgttcctggagtcactgctaaaaattctgcaaattgcagggaagccaatgtttaaagacttctccatcgcacttgtggttgcatacatccacacacctcccagtgggtcacgacttcctagggcttatcccactgccaaggagagaggcccttctttcctccatcctctacgtccccaactcccagcttctttttctatcacctggggggtgcccataatctgtctcaagtttctgatggtgaggtgctcgaggttgggaagcgtttccctgactgtctcgtgagcagaaatgatcacactgtgttcccagccctttgttctccccttagcctcccactcggttttccaggtgaggtcaagggccacatggaaagggaaaaggtattataatggaagggatgcccaagaggagtgtgtatgggaagggttgagcgatcatactggacactttcaggtcttttttattggccatctgtcctccactttcttcttgcttccagggaggtgggtctgtgtctgtggctggatgcagtgagaggagccagaaccaacacccagtctgttcttcagccagaggggtgaggctgagtccactaagctggcacctccacggtttgccctcggcaagcgcctgatgcctaaccaacctcacccatgaagtcaagggtcattcatcaaacccattttcctaagcatctcctacatatcaggcactgtgccaggctgtgggaatgcatgatccacatggtccctgctcacagaatttacaatcttgtgctagaaactattaaactaataatgacacaaataattataaaataaaattgcaggaagtctgcatgtgtcagctcctgaccttccttctacttccaggactgggtttgattaaaagtgaggctactatgatgggccactagaagatctgggaggtgaaatccagtcccaaatctcctctcacccactgactcttgggacagcagagcaagtgaataggaaagaaaaagaaagaagatgctgtaaaaaggtggcttggagctggcaggtgctagtgcaatggatgggggaaaccatataatctgtcatttccatctcttccacgtcactgacattggtcctcttgaccctgtctcagctcagacctgcatcatcttttcacgagatgattgtggcagccttctgccgccagtcttgcctctcacccagcccaagatagcctcgatagaatcgatacaagtctgcagagaacctctcctctttctgcctagagcagtatttctcagccttgggactggtggcaatttggggctagataactctttgttggctggggctctcctgtgcattgtaggatgtttaacaacatccttattagtagtgacaaccaaaaatacgtccaaagattgccatatgccatatgatttgggaaccactggctcagagatattatgcccttgaacttgatattcaaagctctccatgatctgattctaagctgtatttcaggccgagtgcagtggctcatgccttaatcccagcactttgggaggctgaggcaggcagattgcctgaggtcaggagttcaagaccagcctggccaacatggtgaaaccccatctctactaaaaatacaaaaattagcctggtgtggtgccacatgcctgtaatcccagctactagggaggctgaggcaggagaatcgcttgaactcaggaggcagaggtggcagtgagccaaaaagagtaaagaaagaaagagcgaaagaaagaaagaaagaaagaaagaaagaaaaaataagctttgtttcagtatgctcttcctctgtcctgtctctcacattctattatgtagccataatcaagtatatgaaattttcttaaagtgccctacctttttcttcttgcctttggccatcctgttctcttgacttacagggccatgacatcttctctatctattaaaagaaatctacttgtgtcacaagattcaaataaaaggccttgtctgagaagcttttccagatttctggcatttagttatcttacctgtcaaataaggataaaaagtctgccccatggattgcctggaatcaaaatttcagagttgtaggagacctggggaatcaccaatgtcttctttcagggagatagacagaaatgcaaagaagtggattgtcttgcggaagtcatagccggatggaagataagctgcacctagaacttggtgttctaaattccgagatcaatattctaaacccacttgtcagcttttgcaagatgaagacactatctaatcaacaggaaagttaactttgtggccacaaggtcacaaaaactctctgcacctcaatgtttctctgtaaggtgaagggctaaaccagctgttccccaaaaatcattccaggatgctttgtgctactatgcttctaattttcttttgagaagattgtcatttaatcataagctattcttacggggaggtattcataatacttcccagtccatctcattgtgggggctggaaatttctgcccttgctacgatgctgtcaaaattgaaccccagagctcagctcccaagaaggttaacataatggttttgctactcatcgtaacaacacctcacatcatgccttcagatcactccccagcatcattcttcaaattcaaacgcgaaccagaagtgacaaatgattcttgtaatgcgctctttgacacaaatcatttctgattgctcgggaccccagacaaccttgagcatgcagaatcaagctgagagggagaagtcttagaaaatgaacagcttcaacttcttgccgatgagaaccctctctctgctcacgaggcaggagcagtatgtgctgattgccaaacagatcatttttaaaatgatgcagatctgtgggggattggtccgtgtggtgatgtgtctcatcttacaatgtcctatgcagccttcaaagcgtttttagatcctggcaaggaaacagacattcatgtgcgtagggtttgcaaggcctctgcatatgatgttgctcttcatcctcccagcaagcttgggtatgtattgttatccatcaccccataaaggaggaaagggagcctcaaagaattcctagaacattgccaaatgacctaacgtgttgctgttagatcttagactagaattcaggtcctgtggctccaaagccagtgctctataccgaggggcacctctaagctataaatccctttcaaagtgctcttactatttggcctcattctctgtgtatgaatgcttagaattgagagaagaagtgcacattgatgtgaggggggcttatctggaaaatcaggaggttggaatggatcacaaataatactcctggttcaaatgcattggcagaccagtctaagtgccttatgagtatcatttcctttgctttccttagcagcgcagaaatcctgtggggtaagtattaggattgttcccatttttcagagatggaactgagactcacagtagttaagcaacttgctcaaggcagagctggggtggggccagaggcagagatgaatggccatccatcaaggattcctgctcccttgcaaagactgaatctgtgtagggaagtggttgcctggccaaaacctgcatttctcaggttgcctgcattagaagaggccatgttgaccagttcttagcaatggatatggtgggaataaaaatgtcgcttcttttttttttttttttgagatggagtatcactcagtcgcccaggccggagtgcagtggtgcgatctcggctcactgcaagctctgcctcccaggttcatgccattctcctgcctcagcctcccgagtagctgggactacaggcgcctgccaccatgcccggctaaggtttttttttgtatttttagtagagacgggtttcatcgtgttagccaggatggtctcaatctcctgccctcatgatctgcccgtctcggcctcccagagtgctgggattacaggcgtgagccactgtgcctggccccaaaaatgtcacttcttagtggaagtggttatgaagctgatgtgccttctcctctctctatcgcctcctgccaatagacattaatcccttgactgacttcagaagccatgtgtggtgttgaaatcttacaaacttattctgaaatgcttccaaaaagcagaacaaagaaagataaaattgaaattaaaaaataaaaaagaagtcgtgtatggaggaggacagtgtccatcagcatggatccctgaatgaccacgtgaaacagagttcccacctctactccagcctccccacacactgctaattgcacgatgcataaaagagacatcaacttaaattggactaagtcgttgagatttcaggaggtatttgatatagcagccagccttatcctgactaatacagaagagtcttgtttccgaggtgcattctcttcactgctgcaccacaaagtggcctcgggattgtttagatttatggagatagtagaaaatgttctccttattccctagcccaagagcaaaagtgtgttggtatttttttccacctgtgaaggctggggagtatacgggagtgacgttcatgtgcttctgagccgcttccaaaattgaccactcccttcagtcttctcatctcagtaaatggcactagcatatactcaatggcttggcagtcattttggatttctgtctttcctttgcccccacatcctaactttcaacaagtcctgtagactctacctcaaaaataaattcagtgggtgctggaactggctcaagccaacttgtgagagccgactgtcaaattgttagaaatattggaagacagttgatgtcatattgaaagttttaggcggcccatggtggaggtatttgcactatggaaattgacaaatgctacaaaataaggtcaccctgctcccaacagagcagattgttaaatgcctaccgacacatccactgaatattttccaagtttcaccttttcttaccacttgcactgctaccacccaagtcatagccactagcatctcaccttatcttgcatatatgactgtagtaggctcctaactggtcttcctgtaattttctgctctttcccagttaactcctcacacagtagccaaagtgatcttttaaaagtgtaagtgaggccaggtgcagtggctcatgcctgtaatcccagcactttgggaggcctaggcaggtggattacttgagccaaggagttcaagtccaacctgggcaacatggtaaaaccctgtctctacaaaaaattagccaggtgtggtagcactcacctgtagttccagctacttggggcagggggaggggtgctgaggtggaggaatcacccgagcctggggatattgaggctacaatgagccatgatcatgccactgcactccagcttgggcaacagagcgagaccttgtctcaaaaaaataaataaaaatgtaagtgacaccacatcacttccctgcccaaacctctctgggccttcccattgcccttagagtaaaattaaaatttctttttgtagtttacagaactttacacatctggcatctgcccacctttctgactcagcctctgccactcctctctcactcatcggtctgcagctggggtggtggtgtatctgttccaccaacatagcttgttctggtgtcagggtctctgtgtttgctgatccctttgcctcaaatgctcttccccttgatcttcatataatttgctgttttacatcatataggtctctgctaaaatatcacctcctcctagaggccttccttgagctatctaaaatagtcacctcccgcccaccctgccacagcacgtgcttcctgaagttatgttatgcatgtgttcacttgtttacaagtgaaatctgctgcttctactgaaatgcactttgtgagggtgggaatctttctttgttcactgtattctcagtgcacgaactggtgtctggcaccagaagatgctcaatatgcctactgctaaatggacaaacacatacctgatcttcaatatgacatgattgaatgtagccaagtcaagtcagcagatgctcagatcataatgtgggtggaggttctggaaggcagggcctgcaagatagttggaaagttggatgggctgactatgtccaaggaccacagggcaaagggggaaaccaagggaagaatgaaaacagaacagaaagtttgatagggtacctggagggagagtgtacgccgagcctcaggtcagtatctgtcaatgaagcgtcagagtgtgtgtctaggaggggcaataggaacaggatctagatagatttagcctaaagcctctttgttagggcaccagagaaagctaatccctatctataactttttcactacgtgacttcgggcaagttacttaacctctctgattctcagttttctctgtagaaaagggttaatgatatcctcctatggctggtgggagcactaaaggaatagaagattaaaagtcttgagtaaaatgcttggcatgcagtaagtgttcaataaatgcttagtaactgcaaatttccatactctttttaaccttcctgcctgtaaatgatcactctttttattgtctatatcctttagttggaccttagagacaggagaagcagggtatggaagctaaacaggacttagaggtgaaaatggtgaatgattaggtctcatcgcatacccctgtaggcagagttgggatggctaatgagaagaggttaggaggtatcaaaggctccatacagacacggccagtgggaggaccttgggacagtcctcattccccatggcatccacaatgggatccccaatttgttctctgaagtggcatcttctacctggaggccttttttattgagacttacagcatggaggagaacaccaagaaggactgagagggatgcagtggggacttaccaaggtcacaaggccagtgcttggcaaagccgggatagaaacccagttcctctgactcagcccagcactgtctattccaccttctactctgtatcacctcatgtaggagctgcttttccaaaggggcatcagctgctccagagcatgatctgttatcccctctttgtatatccacattaacagttgttcaaccaatgcctgtggaatggaattaattcaagggcaggttttttctacaaggtagatccatgctctcttttgaagaggcatgcccatggcatgaggctgtgaggatgagatacttggaggctcaggtagatttagaaatagaacagtgaaatttgagtttagtaatgaatacttactaggaataggataacaatcttctaaatctataaagtgcattttagcccataaaacccattcagactctcattttcccccacttctcccagcaagcaagtctgtgggtggactcagaagaggttaatgtcccatttgcagttgaagagactgaggcacagacagggaacacaatcgcctctgatgagccacgtggccttaggctagagtctgagaaagggtgactattggctactgtagtacacactcctatcacctgcagatggagcctgcagtgcccccaaagaggttaatttctcactagcagattctttctcagacatccagcaggtgacttgcattttaatggaccccagatgcttattgcttgcaaagaggtcaagtttctaaatgggcagccagatggagagcccttctggactttccctggtgtcaatcaaggctgcgcctgccattggcgcctgcttttcttgccctacaatggtgctagcaccttccatgctaacagcttcctccttctgagcccctttcagggctcaaggctggattccaaggtggagggcaggaaagctggaagcataggcagggcagctccaaatgcaaagatctgaagacccaaatgcacattctttcctgtttgccagggaaacatgtagacaactttaacattcaatgccttgtagaagtgcaaccatcgtgcatcaccacatatacagtacagacaccaataattaaaacccagcccctgtgcctggggcctcatggctcgtgcagcacgttcacaattgctctctcatttgattctcataggaagctcagctcaatccttgactagctcgggtatttactggctgccaactgtgccaggtgctgaccttcgggagctcacagtccagatgggagacaggcacatagcagggaattacatgggagagtgcagggaacaacatgagacccatgcagtgtcatgggaatgagtgacaagggacttctgtcgaaaaggtgctatccaggctgaggagttagccaggtgaaggggcagggacagcggagtgttccgggccaagaaacagcatttgtaagagcctaggactgaaagaactcagcacttgtgttcatttccttgggctgccataacaaagtaccccaggttgggcaccttcaacaacagacagggattgtctcacagttcgggaggctggaatgccaatatcgaggtgtcggtagagttggtttttctgcagcctctgagggagcatctgttccaggcctctcttctagcttttggtagctccaggtgttccttgggttgtggatgtcattttctgtgtatcttcacatcctcttccctctgtacatgtctgtctctataaccatatttcccccttttctctaatgacacaaatcatattgaattaggattcactctaatgacctcattttaatttgaccatcagctaagatcctatttccaaataagctcacactcagcataggtagtaggagttaggacttcaatatattttggaggggggcacaattcaactcatcacagcacttcccaaagaatgggaggtggcataaagattgagggggaggacaacaaggggaggtcaggctagctggtctacctggaccctcttagggagggttcatcagccatgatgaagactttgcaatttattataagggcaaggagtgacccattttcgctgccctcacatagagttagttagtcactcctgtgagttcttggactcactcctgtgagtctctcaagagtactttcctaggtgggcgggtataggtttccctacttgatggtgcattcactgagcatagggaccaggtcttccaagtcttattattcactgggacctaccagcacagagatcagcacacaggacacgcttaataagtgtttatgaatctaacacatttaggtcagttattgcatcagctgaatgaagagctgtcccttcatttatatgtgcttttcacacatttcacatcgttgttgcaatagacacaatcccttttgcacatcttcatgtatattcttgatttctcaggttgaaatgttattttcatcttcttaaaaagagaatccttcattacattcgcccagactcctgtgtcttatgtggtttacaaaagagatctgactgggcatgttgtttttttttcttagggaaaaaaaatcaatgacttatttgtgtgtctttaatgtagagggaagtagtagaattggttttgccatcttaaggttgacaagtttaatacttaagacagggtttattcaatcccaacattgttagagcttgtaaaagtttaatgatctacttctaggatttaagatttgactgagtctctctctctctcttaaattttactccgacaggtttgctctgagaaaagcaggattttgtagccctggccccaatctttggacttctgcaaaacgggagatcagaaaccccacaatgtcccccccgaacagagtgattgagtggctgataaatctgtggacatgtgaaaatgaagtgcagcttgctatattatagcatccaaactgcaggggagccaacaaacatctaactctgcccactcattttaccactggggcgaacgaggttcagggaggagcagggactcacctgagcccaggaatagggaggctcaacggaaactcaggccattgttgcaaagcacatcctatctgcagtaaggtgaggactgtatcattagggcttccactttctcaggactttggagatttctggctccccagaagcctcatggaaaggagtgagccaccttcatgcatttacctactcccagagactctaatgcaagtgccccttcccaagcagccacttctcaagcacatcactactacaggtactccatctccaggtgtggatcccaggtgctctgcttccatgcatccttcacctggtttcccaggtcctttgcttggtctagtgcagggttaagacccactggacaagagtttgggagctctgcccttacaagctgtgatcttaggcaagcttctttatctctctaagtttgtttcctcatcaatttcatgggaataatgaaagtttctatctcataaggttctaacaaagacaacaagaccaatgaatgcaaaatgctgaatacactctctgttgtatacttaaatacttgactcctttggttgtgtgtgtagattccaattagtgggaagcaaaagtcacttcaaatcaatcttcattgttggacatttgggttggttccaagtctttgctattgtgaataatgccgcaataaacatacgtgtgcacgtgtctttatagcagcatgatttatagtcatttgggtatatacccagtaatgggatggctgggtcaaatggtatttctagttctagatccctgaggaatcgccacactgacttccacaatggttgaactagtttacagtcccaccaacagtgtaaaagtgttcctatttctccacatcctctccagcacctgttgtttcctgactttttaatgattgccattctaactggtgtgagatggtatctcatagtggttttgatttgcatttctctgatggctagtgatgatgagcattttttcatgtgttttttggctgcataaatgtcttcttttgagaagtgtctgttcatgtccttcacccactttttgatggggttgtttgtttttttcttgtaaatttgtttgagttcattgtagattctggatattagccctttgtcagatgagtaggttgcgaaaattttctcccattttgtaggttgcctgttcactctgatggtagtttcttttgctgtgcagaagctctttagtttaattagatcccatttgtcaattttgtcttttgttgccattgcttttggtgttttggacatgaagtccttgcccatgcctatgtcctgaatggtaatgcctaggttttcttctagggtttttatggttttaggtctaacgtttaaatctttaatccatcttgaattaagaaaatgtggcacatatacaccatggaatactatgcagccataaaaaatgatgagttcatgtcctttgtagggacatggatgaaattggaaaccatcattctcagtaaactatcgcaagaacaaaaaaccaaacaccgcatattctcacttataggtgggaattgaacaatgagatcacatggacacaggaaggggaatatcacactctggggactgtggtggggtggggggaggggggagggatagcattgggagatatacctaatgctagatgacgagttagtgggtgcagtgcaccagcatggcacatgtatacatatgtaactaacctgcacaatgtgcacacgtaccctaaaacttaaagtataataaaacaaaacaaaaacaaaaaaaacaaatcaatcttcagtttgtgtgccagggacagtgcccagactcccaagtgtctttggggcctctatgcaaaataactttcacccagtactctctccctttcatgtgagaggtagtgtcagaagtaacagtgaaagcttgaaagtacagactgtaaatggctcaagttgcatctccctggagcccctatttcaacatagttttgaccagaatgttggtttcagctgcaagcaattgattggcctatacaattctgtcatcccaacaactgattaattcatcagtaatgaaactgtctgtggtccctgctagcatgcgagctaccattatcgagcatttattctttgtcaagttccccaagtactttacgtacattacctcgcttagtactctcaataaagtcttattacacaagccttgttattctgctctaagcatgaggagcctgggaggtcagttcagagaggttaaggaagctgcccagggcacagagctagtaaacggaaaagctgggatttgaaccccagtctgtttcagtctttcagccacatttttaaataggcttacaggggaataatttatatacagtaaagtttacattttttgagaagagagtacagtacattttgagaaagtatacagttgcataagcaccatacagtaaagctagagaacctttccctaacccaggaattcccttttggccctttgcagtcaatctgttcctttcaaccccaacccctgggagcctgcagtcaatgatttgttttctgtgactatgcttttggccttttctagggtgatgtatgaatggaatcttgtagtttgtagtcttttgtatttgacttctttcccttatcagaatggttttgagattcatccatgtggtcgcctgtgtcaccagtctgttccttttcagtgctgagtagtagaccattgtgtgaataaggtataccccactttgttcgtccacgcaccagctgatggacatttggattgtttttagtttgtggctattatgaatgaagctgctatgaacatttgtgtacaagtctttgtgtaacaaatgttttcatttctcctgggtaaatacccacgagtggaaattcctgggtctcaggttaagtgtatgtttaactttgcaagaacctactgaaccattttctaaactttctgtacctttttaaattctcatcagcattgcactgaaggttttgttcagctacatttaaaaatgttagactcaacatctacctcattctgagccgggaggttgagaataatgaatgctacatttcgttgactctaagatgccatcaattttaagatgcgccattattttacatactgctaagaaagaaaagcatttcacaaatgatgacacaatgcttttatatcacttagaaaaaattttgcatacttattaaaatagcccatatatcacccttatacatacataaaatggaaaatacaaatgaaaaaaaatataggtcgggtattcctagaatgtgtattcacctttagaatcttctgattttttttttgactccagtcctcagtatttatatttttgtcccccggagtttccctgtgtgccatcagcctgttgatggtgcagcatttttaaaagagtgctctgttactgtctccaagaattattttcaagaaaatctcagtgctgggaactgtcttacttgactacactcatattttacacccctctacccacccagttgaattatgtatcaccagaagttaagtagcttctgttcaaatttagtaaaatgatttttggcaaattgatatttgttgccttaaagatagccctactccatagataaatcagtcccaccagcctctattgctttacaatttcattaatccttttttaaagaaatatgacaatttatcctgccttcagtagctgttggttctatatgttaagcaatgcacataacccagctgaagttttgacaacattcatggctgtgagacccagtccacacatgtatgggctgtgatgacttccttgtgacttgctgtctgacagtgattgaaagacgtcttcatttgtaggagacagtctgatcttagggacattaaaattgaaaaaaattgtgcatcttagagctcattaaatgcagcatattttacccgagacgcggatttctactgtgctctatttttcaatatcccccaaattcccataatagacaagagaaacatctgcttcatttttggccacttctttctccccagccacctctaatcacaatgattctcctcttcttaaccacttctgtcaccttcattcaatgcccattctctttaccatagctattgcaaaaacctcctcacttctctaattgccttctagaaatttcttctccttcaatcagtcctatttattattcccagagtaatcttgctcctataaaaatccaaacatgtaattcttcttcctaaaactctttcttggatacttattatttaaagaataaagtacaacctccttagcatgacattcaatttattttacgttctgggtcctacattttgccccagcattattctccaccatttcccactccaggcacacccaactatttggtgttctccaaacgtgccttggactttcccttgctgggacttttccattctggaattctgtttatgcttttgtctagaattccttctcttccttgttcctattgaaggctgttcatagaaatgaagcataatgctcattctggttgtattagcatgatgcatttatgggtgaagttttctcatatatatgtgcatatatatatgtaaatatatatacacatatgtatatgtaaatatatatacataagtatatgtaaatatatatacatatgtatatgtatatatatgtagacacacacatatgcacaaatagacacaatcacatatattcatcttattcattcttagttgctatgtcctctatggaattttctttgtgctctttaattggattccttccttcatgttttctcaacacctgcttgtaccttcgattgcagcatcttttgctgtaaaatggagataggagaaatgcataggcctatttcaacaattaattcaattacatagactaagggtgctagaattttggaggcacccgagtatgatgaaagacatctagaacttggcatcaggcaatagtgagacaaagctgcagccctgtcactttctacctatgcgaccttgggcacataatgtaacctccttgacttgtgtttcctgaagttcctgagccaatgtgagccctccagacaccttgtagaaccccttctccatagagaagaaatgctgggaaaactgccaagtgccttcctgagtcctcatgggtagggcaattctgtccctcaagttacctcctccagcccttggttcatgttttgtggaagagatggggcttgaaacatttctctctcctcttacagattatatacgtgtagctggcacaggaccttgctagcacaggacctcactcccagctcctcctgcagctcaacatggccaggtgactggttctcactaaagcaacgtgagtggaagtgacaggtgctaccttggggtcaaggcttttaatttgcaagtacctctccaggctctcctatttcatctgctggctgagtgcagatgacaactaggacctaggctagtgcttctcaaacttgagggtgcatcagaaccacctggaaggcttgttaaaaaaggttgccaggccctacctccaatatttctgatctggtgtcccagagaggggcctgagcatgtgcatttctaacaagttccagggtgacgctgctgctgttgatataggaactacagtttgagaagcactgtcctaggagacagcacagacacaacatggaaagggcctgggtacctaatgaccatggatggggcagcagagggggtgggtcggtcaattgggtatattcatctgccactattaaatgatcaagaaataaacttttagtgagtttgagaatttatagattttggtgagtctatatgcattacagtgggttaatctatccttcaaagcactatcccagctattcatgaggctagagtccagacccattgaattgtccatttgctggctgtctttcctcctggtctggacccagctttggagtccctcataccctcccaggtatctgatcacaacagtctctgggccatcactcagagactgacagtcctaatctcctacaagccctcctgctctctgccattggacctatggatagtcgccccatcctgcagaagcctagagtgacctccaacccactggacttggtaatgaggacttttggcctctccctggctgggacaactcatcccccccatcctaattaattgtccctggttgctgccttcgccagcttctgcccatgctacacctgcatctgagaacccccagtccccttgcagaatgctagaatgctaggagacagaatgctagaccagtctccccacctcatacccagttcctcagttccagcactgcccaggcacacagtaggtctcaatgcctaaaagcaaaactgcagtgaccaattctgaggaagaggtcaggacaagaggaatgacagatggcagctgatacagccagccatcacagccaggcacaagatacaggttcagtgtcactccagcaaagttcttggagcttatcagaatgcagtctctcagacgttaacagggaaattgtgtgataattatatattaaaaagtttagcaagtattaagagatcactagttcaataagcatatgaaagctcaaagcaggattcatgccattaactcaaattacatgagccgagtctgctgtcgtctcccttttaagcagcacatcaaggaaaagaggtgctttcattggattattaaaaggatttaattaacatggaatacttcacaggaagacaacctatgacagaataattaaaatatagtttgttgaaatgcacattaattggctactaattatcacatttcgttcccctttatgggctaaagatacgctcaggaggagacatggctctgtgcagaagtacatttccttgcttgttccgctcagtgtttaattagaagaaaggacaaagtgcttcactctgcaattctagaaaactagattggaagtcagagcgagcaaatgaggggtattattgcacactggccatgcattgtagtgggagagagcattggactgggagtctacaggcctgggtgttcctctcctgctctactctccattcaccatgggtaattaccatgcttaaaacagttcacggctgcccttaccattgcataaattccaaatccctactatctggtcagttatggtcagacactcaactgtttttccaagattccccaccttgcccattccactctagccatgctgaccttgctgtaccttaagcaagtcaaggtcattaccaccacaggacctttacacttgccattttctcagcctggagtctctccccctgaagcttcatatgggacttcttcccgtcattcacaacttagttcaaatgacttctcagagggcttccctgactatctaatctagtgttgccttctttattctctatcacatcacagtgctttattttacccccagatgtaacaccatgggattatcttgagtatttatttgttcacttgttttgtctgtttcttgtattgtctgtttcctccacttgaacatatatgctatgaaggctggaactgtatgtttccttgatgcattgcagctccagcacctagaacagtgcccgggacatggcaggcatgcaataaatatttgttgattaaatgaataaaaatggcagtggagcaagaagacctctgaaggtccttttagcgcgaacactttaggatactttgaacatgcagagaaccaaaagagacataaaggctgcagaagacagggtgcatcttaactcgttttaggaaccccctactggccctcagcaaagctttgctgatgatgatctttcagaaagcatttgtggcttggggtccgtgcaagtctgcaattctagggttctcaagaatcatcaggattcctgaccatctctccttttcaaagctataatcatggggtcatcactttaaaaactcacctcctctcttaattttttcttacctgctttaacctgcttcatgggattctagcaagaccaagaccttcctttcaaggctcattttgcaaattagcctagattgtggctgacagatgctgcctatggctgttgagtgggcatgcttgtttttcaaatgaagagttcagatccttggcattatgaaagtactttcctgggttctaaatctacagtcctgttctttcctcctttagggaaatctgtgaaacataatggatgatagaccaggttttaaatcttcttccccaaaagaggtggtcatcctcctccctaatgcttctgcctgcctcactccatggtgcctggtcacttcttcctcctccacctcagtgacttgggtgacaatgggctttatcacctccctgccctttgtgaactattgccttctcatggggcggctaaacctagggacgctgagacagccttgagccagaggcctggaccagcttcacctccagcattttgccagatgctttctttggctctgtgtttctggtttttcatctcagagcaactccttatccgagcacagtggaaattcaaatttcagagttgtaggtgagagctgagataaatcaggccctccatgaggtccagtccagctcagtggagttctgcacagtcatttggggccagaggtccagatagtaataaagcattgctttgtctactctgtgaatatattgtagaaatagtttatggaggagtgcaaataccggaacgatctcaagcagtgttgttctaaagtcaacttttaaggcaatatctcctttgcaagtttgcaatcacagtaactgctgcggtctgctatgtgagtgctggtgggctctgctgggcgacaatgactggcaggcgatatcatgggaagaaagggctcacatgtgtgatgttaacagggcgggacaaatcacagtaaacagctgcagtgatgtcacaggaccctcatggttaattcacatactgggatagctcttgtttacattctgggacagtagcaactgctttaaagctctattgtgtagtagttaaacagcagaggctgaagagccagacactctaggtttggtcctgtctatatcacctactggctactactgggctttggtttcctcatttagagaagggataattgcatcccttgtaatctaatggagagaatattagcaagaggtatgatgagcccagagtggagaaaacaataactgctgagtaaagagattatggtttctagagaaggtacatttgcagtggccctctgtgcatgactaggagttttataagcaaaagaagctatggcaaggacaggagtataagcatagggaaagtgatagtagtgatggtggagaggagactacattttaggtaggaaacagcttttgtgtgactgacctgtgaattgtagtggaacaagaacgtgaaaagatatgttgaagctctgggtgggcttaatgcaaagctaagaaatttggactttgttctgtgcaggatttcttttattttttctggatgatatttttatgcctagaaaataaataatatttatcttaagctcactgcagaaaacttgaataccaagaaagtgtaaagaaaaaacaatcatatgcaaacctactacacaaaataattgctgttaacatttggtcggatgtcttttcggtgctttttcgatgaatatgtatgctgatctagcattatgaaaatgttatctagggaatatttttgagcaggagagtgttgtgcaattaggtttgcattccggaaagattctggtggtggtggctgtggggaggagggctagatgaggttgcagccagaggtcaggacgctgttaggactcattctagtccaggggaggaatgatgagggcatgggccaaggcagcacctgtggggctgtggagaagtgacaccttcacaggaagagacaccaaagacaaaaaactgctaccttcgtcaagtcaaacttgaagtcaatggctgtaccaatgaccaatcaatggccactaagaatatcttctctaggattctggtctactcccaatcagatgcccatagcttggtcttccatcctagaaaatgctcttctccttgtgaataattagattatagacatccttcccctaggacccccagctctctccaaaaacttcactgtgcttccttcaaaactcagtaggagggatttttagactgttgttctgagatgccatagccatcaggatcccttcgatgtaaaagccagatattgtcctcacaagggaacttggcagcatggctcttctgactctgcaggtgcgatgccactcacctctctaacctcagccattgttctcctcccttccacatccctccccaaaccagctgccaccaagctgtgaccagaaaatgaaggttgtcacaaaggagcctgaggctgggtgtgagaaatgagatgtgttgtctgtgatgggggaagattgagaaactgaataattgggggcctgagaaccaggctcttcagacagtcgggatgggctcacagcatggaacacattaaaatctcattgcccaccgcttcccggtagcctctgctgcctcgcttcaagtgctgttttataagcagtgtttgcagagagttaacgaatttgaaggggccctgaaagggaaagggcctctgttgaataacttttctcttactagagaaaatgagagatggttttccttataacccaatttccaaagccttttattacagagcgtcaggaagatttgcctcctgccaggctgagtggggctgggccagctccctagagagcttagagatggttggatggctgctggaggcatggagggtggtcaaactgatagaatcaatacaatcttccctcagtaacacaaaagacctttgccaactcatgctttttgcactgatttttctctcctgaaaccatgaaatgggaggtagcatgtagcatgatggaaaagtaacaacagggacttggtgtccagcagacgtgggttccagttccagctcttgcactttctgacatgactgcagtttcctactttgcaaaaggaaagacaatatctgcctgaaaggctgccatgagtgagggtgagacaatatgtaaagtcctggtacatttagactctcaacatctcttcttgttcatcatagatactttgaatatttctcagccaaagatcaaccagtgggatttgtgcattttttgaggtaacaattttagggcagtgatttgtcaaaagttacgtactgagttccagacaaagctggaagccagatggtcagtggaacactcgcgtcaggtattctgttagtgcaatgggcatggctgttaatggtggaaatgtttccccagggaagtgctgctgggctctcttgcaccgccctggagctgggaggggaaatgcatttgcagtgggtctcttctccctcccaactgaaccctgggcccactggacaatgtctgtagaagaggggctctgagcagcagggacatttgagtcacttgttctttggggcttaggactggtcaagagaaagggactcctagagttctggcaatcctcccctaccctggagtggcagaggccctagtggaattggagtcctttaaggaaacaccaaatcaatgcagtggaggcactgcatataatctgaagggtaggggtcttctctggggccagtgaaggtgttgctaagagggtgggttgagatagcactaagctgacatgtgaacaggtggtaactgaatatgtggtttattttgggctttagaataatgagtcatattcataataaccaattgaatgtttcttgcctcagagcttccagagaccccaagacaacaggtgtcacaacttaaaggggtaagacttgcaaagagaggtagaataaacagctttatgtctcatcacctcttcagctctgataaaggagattgtttgggaggcagatcctttattattactattattattattattattattttgagatggaggtctctctatgttgcctgggctggccttgaactcctgggcttgagcaatcctcccacctcagcctccccaagtagctgagactgcaggcgtgagccactgtgcccagctgagaaagcttctttaataccagataacctttattgagttctttccatgtgccaggcatggtactatgtgctttccatctttaacccaattcattctcacaacattcaattatgtggtagtagatattattattattattatacctattttggtgatggagaagcttaggctaagacagataaaataacttattctaatgtctcacacatactaatgaggcttaaatgactgtatgaagcactttgtaaagcagaaggacccagcaaagaactttgattgttctgcatgaggcaggtagacgttgaatctgagtccttcgttttttcccctgcagttgagttctcttcctaggtgcaattcaagcatccagaaacagcagaaatgcttaggatcaataaattgggtggcagtgctgttaggcagtaaacttaggggagaattacacagggcagccatgaagacccaattctctaatgcctggggaaacactttgcaaattggtcggtgatgtttttaactgccttggatggtttcctatgagtgaaattgttctgtttggaaggtggctttagttggagacagtgttatttgattgtgttgaattcagtttgagtctacacaaatatgacacagagtctctgtcctgagtgggtttgaagtttaagtgggggaagggagagagatagtaatggagttagactattttagcatcactgcttatatgtgtgtgtgtgtgtgtgtgtgtgtttgcacgtgtgcacgtgtggtggatggggatcaattgaagggagtgaccatagaagggctattgtaaaataaatgaatctctactatgtcaataagataggcttaggggaaggggtatttcaagatgtgggaagagcacatgcaaggatccaaaagggcctggggttgccagttcaaagaccatcaacctatgtaccaagccctgctagtgtctgtggctaggatcattttcaagtggttcttctgtcttctgtgctttttgaggaagaagttgacaggcaagggaggtgggtctgaaaggaaggaatggccaacctggcttcaaaagaagcaccaccagagggtacatacagtcctcaccaccagggaggatctatgcctgaggctggccggggactgagctgggggaagtaaggctgagtgatatttcatatctttccttactgagaagtgactctcagtgagacttttaagactgaaacacatctgaaatgaactcccagccacactagaccataaataaaagggaaggagcctctcacatatcaaggtgaggctgagggttttaaataaatttttatcccagtactctcaatgactctgcaagatacccatcattatctccatttctaggtgatcagtaaaaagtggatttgaagatcaaatccagatctgtctggctccaatgtctatgtctcaaatgctcatcctctccatgtctcttccgggtttcacaatggtcagatgtctcagaaagttatgggcacgcgggtaacagaatggtccgtggctacctaacctactattccctgagttatgcctgtagtgccctcctagctaggtcccacttatgcttttggtccgctgctgattaaatgaatggatttagaaggtacttgttttccagtgtagacggagtagtccaaattcttgtgaaataaggacaatacatgtcctattaacagctgacaccaaaatatcttttaagaatgatactatttgtttggaatataacacattcttgggggtgcaaagtgagaccccccagcaacatgtgtatgaagataactgttctttgagaggcaaggtaaaaatttgcttgctactctagaaagacaggaaatgaaaagtggaaaaataagaggtgatgaggagagagagatggtgaaaagctgagaggtgcaggatgtgacagcccaaactttgagctcatgagttaacccaactcatgaaattcttggtccaaatgacactgtcataaacctatgaaaggatggagcttatgctcaggttaccatggagtagaaattggacctcaggtgtgaagatcaggaaccgagataaggaaatccaggaggatgtcagcagtcaggaattcaaagcaatcatggaaagaactctggactcccacaggccttgatttcggggtttgagccggtttaagtacattttcaagggatacagggactctagctgagttctaccaaattgaacttctagcactctccagagcaagatgagattcagctcagataaaagcattctgttttccaggaccttagaatccaggtatataacgaaggctaccaggaaggatctgttgatcatagcccaagatgcctcttggaaaagatacttatttgaatatcttaaagatgacagccgcccattcctgcaatgtgatcccacagcaatgtggacactggtttcccagcagcttcatcatgaggtagacaagtgtaatggctgagagtaaaggtcagagccagagattaagggtctgtgggtgcatcatggtgttaccaccctaaggctatcaacccaccttggacttctgccaaggggagaggagacatggggagaagagacaatcttaaagagcaagttacacaatgaactgagtaactggagttcctagaggggcctaaggcataaagcagagatgccttggagtttaagagccctgacaagatgtggcatagctgcctctccactcaccttggcttgagaatgacagcacgtgggaaaatctgagagctgggatgatgttacagttgatttctttcctgtctctatgaccttgtaatgccaaggagccactggatgacaattatttacttagagcttaaatacgtttaaattcagaaaattaagcacagctctcttctaggtgcttcagcaaaattttaaacttttgtgaagcataatgaaatagattctgctaatctaaaggtttgtggctgcatcagacacccaagtttggtaatgagtgaggcctctggagctagaaagtcacagtcatctttgagggaagaactttgtggaatttggaggtatatgtattagtgtttacaggtaagctagccagtgatgactatgatgatttttctttccatctgccctttagttacctacataaaaagaagccattgatcctctcagcatatttccatttcccatattcccctaagttattcccataagcatatcttagcaaattctgctagcagtagaacatgtcttggtctgtgagaggtgccttaagtgtaagcacaggtgagggaggaatggtggaagactttcttgcaattagctcttcctgttctatgcaagagcccttcttggacagctgcttttgcagcatctgtctctttgttatcatcatcacattagctagtatttgtggagcatcttaagtggagcaagcactatgctgaccactttccaagaatatttctaccttacttcctataatgtggtaaatattcccaccttattcagtataaggtggcctttttcctttttggtctccattttacaaatgttaagtaacttatctagtccctagcaagtaagtgaaaaaccaagtgtagtctcaggtctatattactctaaagtccctgcccttaatctcagaaattgtttcctagtcactatcctcagagaagaaaatcattgaaataattgtattcattcattcattcaacatcaactaaatacctactatgtgctaagtgcaatgttaacagtcaagactacaaagatgaacatggcatggtccctgactttaggaagctcatggtctaggcgtgtaagtagatgttataaaagagaataataggataattgcaagcatctcaacagagcattatgggaatactaaagaggaaccattctgcattggtggaaggaggagtgttagagttgagaaagaagatgagccttagaattcttgagattaaaaactaaaaatgaaactcagcttgtccaagacatatttctgcagggtttgccgtctgactatatgataacaccaatgatctcatttttcaagacaaaaagttaagcattttatttacacatcccactctattattctccatatccaactcatcactatattatactaaatatccctcctaaaaatcttttgaaaacatctacttatctccagaggcatagctaccatcctagcataatctatcatcattatctctcacttgaatcttggcagtaaccttccaactggtcttcccattttcactctttctttgagcttccttttctctgcaaagactaatctgttactcatttggaccatattttttctagtagaaaatttacatttataatatatattttaaagtctttactaaacccaacatttgggccttcttggtatctatttctattaaagatttttttcttgcgtatgtgtagggtccagccccacagggttggtgggtttctccccgtgtgtggagacgagagagtgtagaaataaagacacaagacaaagagataaaagaaaagacagctgggcccggggggccactaccagtccgaccctgtggggctggaccctacactatggatcagagttttctatttttattcatgtttagtaatttttgttgtatcctggacattatggatgatatggcataaatattctgggttatgttatcttcctctgaagagtgttcagttttgttccagcaaattgttcagtttctggctgatgaccttgaacttttagagatttggttttatgctttgttggtggaggaggaattctgtggtgttctctaatctcctctaacttcatagtactaaaatttcaaaaattcccagtgaatctggttgaggattgtttttagactttattagaatacatctagtgtagtccttactcaaggaccaagatcagcaaactttctcttgagggccagatagtaaacattttaggcttgtgaaccatatggcctctgtagcaaataatcagctctactactgtaacctgaatgtaaatgaatgggcaggatgtgttctaacaaaactttgcttataaacattggtagctgaaccaagagccataatttgttgaccctgcctgaggacatgatccttactgttgttgttttttttttagacggagtctggctcaatctcagcctaatgcaacctctgcctcccaaattcaagcaatactcctgcctcagccttccaagtagctggaactacaggttatgcaccaccacgcccgattaagttttggatttttagtagagatggggtttcaccatgttggtcaggctggtctcaaactcctgacctcaagtggtccacttgccatgggctcccaattacaggcatgagccaccatgcctggctgacatggtccttattcttaaggcatggctttctgatgtcttaactggatctccaggtgttaacaaggcctctacactctgactgagcaagaactccagtatcttctagcactacttgacttctagtatttttgctccactctcaacctcataacagcccttcctggtaagcttttatgccttctccctgtgtctgtgctgtccatgactcctaccacaaagatatctggggcccccttcctcacagctccccactttatcatggcctaccccacagattccagtcacttcagtagtctcaaaatctgattcctgcttctggtcagtgggaatgtcatgctctatatgggctctgcccctctacatcacagctagaatattgtccctaaatgaagaactgaaaaaaatgagatctcacttcataattttcttttttttcaaaggtcgtggtcttgccattgccattgccagaaagcagtttccttatatattctgcctagttttgtagtcacttatggcagagggctagcatagtgccagtgtctccattattgtcaaaagcagagatccccacattcatacctgctcttttcaatgtattttctactctgcagccagagtgatatttccatctgatcatatccagtgccctctttaagattattcaatgaccccttattgctttgaagatgacatgtaagggacagtatgggtttttgcccatcagtaaattcccaacacacagtgtagtacctgccttatgatagctatgtctatgatataactatttttgagtaagtgaatgaacaagaaataacatttttggctgacagaacaacataagcaaaggcagggtagcataaaatagtatggagaatagtgaactatttggtgaaattccaactcaggatgctgactacaaattactcaaaggcctcatgtgcagaaaatgtgacaattgaagcccatgttactgtactgccattttttttcaatcaccaaaggccttaaaccatttgctcagcatgaagctcttaagatgaatacagctgtcgaggcaaggcaaggaaagctttcttggacctcggttggctgtgttcacagacagacagatggacatgtgcgcaggcagaggcaatcatcaatttgctaaaaataacacctcaaccagtttttcacagaaaccctaaaggaagagaaaacagatcgatagcaagcataccacttgtgtgatgttgacgtcctccctgatcagagaaagtgaaatcaccttggagaccaagttctttcccagacagtagaggaaatgactaaggcaactgctactttggaaccaagggaggccccaaaggacttatgagttgattaaataaatctgacaggaaattttagataaggaaaattggcatttatgatactcagggaagggaaaagcaggatttgggcagcaatgtatctaggaccttttcgaaggaagatttttttaaatgttcagaggaaagcgaggtgtgggtctgtggtttgagactctggaaagaactcaaatgaggtcaaaagttctccaaaatatagtttcaaaactgtgccctagaaaatactcccaaggtgaaagaagcaacgaatgtgaccatggaggttagcaggagacagaaattcacatttattgggtatcctctgggtgagggcagactgcttggggctttccatgagttagctcatgttatctttataataactccatacgttaggatctattattcttatcttagaagtgaaaaactgaagcttagataagttacagtatctgactgaagtcacacaactaatacacagcagaacttcaattcatacccagatttatctaattccaaagcccatagaccttccaaaataccacatcgcctccctggtgtgcatcctgtttttttgtatgcagtagtaggtggcatacttctgggcagtctaaattttcagaggtcaagcctttctgtttcctgggccatagggtaatgaatgcagtgttacagagaaaagggagcatcgttatgacgaaaagggagattctcatttcagaaatgagaatgttaggcccactcattactggtaagaattctttccacttccccactcatgaaggccaacactagaatttatggatatatgtatgcatatatgtcatggccaaaggtcaaattccagctttatcctggagtccggaaggcacaggtataacatccatgcctgtgtgcttggcttgacatgcttgggttttaaaaatcaattaaagagaggctttgatctaacatagaactgatagcactggcaggtgctctctaagcttagtttcttgctatgcaatgcaacatttataaaattcattcccacctgtagcaaggcaaccccactttacatttgtgaagggtcttcaggaaggcaaataattagcttcggtgatagaaacagaagactgaacagaaacaaaacacagaaactcttgttagtggactcttcttccactgtctgcatcgtttggagtgctgcaatttgtagaacaccatccattttcttatacactttggtgtttttattcagacagacatagggggcgtgagctagaacatatgctggtgtgagtttggatgtgtgtattgaaagaagagcaggcaggagcctggaaaaaaatatgtgcaaatatggcaaggagcagaaagcccagcgggaattgctggtttcctagcaatcaatgaccaatttccctttggggctattcccagaagtgcagatcacttcaaaaatagatgcacgtcttagttcagtgattgacgtttttctaccaaggactgtgtgcacaagcatccctctagtgagatcttaagatcttggatttgagtattcacattcctaagactcctcttcgaagttccctcctcacttcccagacttctcgggttttatctcaggatagctgttccaatccggagtgatgaaaggatttcttgcagggaatcagtcagtggcagttgttgttctcaggacattcagaaccatcctccaagactcagctcaaaggccgcttcctttgtgaaaccctcttcaacttgtacgggccaaatgcccctttcacctttctctgcactttcaaatttgacattttcttgtaacacattttttttttttctaaatggctgtttttatgcaggggctatctttcccaatacagtagaagcttcttggttccatctgatttatctctgtcgctttctggtgccaagcacagacctagtgtacgctaggtgcttagaaatgcttgttaaatgattgaacaaatatacagagcctcagagatttcttatgtgctttcaaattgccattcccattcctaatcatcagccttgtattcccagcttggaaaaaagcagaagaatcactgtctaggaccgatggatgtcattgctgcatcagtgtaggacgtgacatgctacctgtcctggagggccaccaccaggagagagcacgtcacactcttgtgcatcggagtgagtcttgcctgataagggaagtcactcttggcacctatctcttgggaaaaaggagcgtctcagaccagagctggcatgtgataggcttgggggcttcctacaggaatgggactctaaggcttagcctccagagggttgatatgtgaggcagctcctggataagatggcaccaactacttggaatggacccagcagctagctaggaggtaggggtatcaagcaaggggctggatgggtggctgcctctgatgacatgtggatcccacactcagaccacaggataaactgggcctgagtgtcaccctcttgattcattttctgcactcccttagtatttaggcaacttccctgcataccacagccagttgcagctgctccacaggagaaccacaggattcatgggcttaggctagtgggctctaggaggagctgttgcagggagattgctcaagggaatgggaactcttgggccaaaggaaccatgatggcacagccagccacccgtcaaactggggaagcttccctctaaagcttaaatctccagagttttgctacttaaaatgatgaggctttctgctcagaccttctgataagtgggaagacagtgatacttcagttagcacaggacaagaagggaaatgacatttgcacagtatttgtcctgtaccagacactttacatgtctgctaatccaatctgctcagcagcctaatgatgtagatattatttttcctgtgttatggtggatgaaactgaagcctagaaagaagtgactgctcacaggataaaccgggaattaaatccacgcttcctcattcccaaccctggctccttctgattcttgcatttgaggcatctgtaaaaatgtatagctctacctcctcctgctccccatccccagcccaccactggagcatttttcactaaatgctgaaggtactcttggcctttacctacttcttatttttctaagctgcatggcctcaggtctgctccttggtgattccacctgaaacttctggagtgcatcaggctgaatgagaaaaagcattcagccagatccaatcttgtagccactgctcccagttaaagaaccagtgaggggccagactggaaatgatctcagagaccatctagtagaaccccatagcttttaatatggcgaatccaaggccacatggggagtgacttgcccaagcccatctgtagcaaaggagatgggtgggatgctagagccaggtttctcctggccacctgccttatttcttggatgctttgaccagcaggatgggcttcctttcactattgccatctggagagccaagtctgcatttgactacagacatgcatctctaactctggtactcgaatatttcttacgagattagatggctaaagtagaaatcagggccatagtcctgacactggaaccaggagctccctgcaggaagtcacatattcctgtggtgggaggagcaccgcggcagcccccctgaggaggtgaggctgagctgatgccctgcacggtcttgcatggctgagatgaaccggataaaggtgcattgctctgagacacacagacacactgccttgtctctgtctgtcttcctctctcgttttaaagcctgcatccctatctccaagtcagcaatccaattagtggagatttttaaagaaaacctcaatattgaaaaacagaagtctcagttaaggaggcctgccctgactcgttaatccaccggtcagtttgcaatggatcaggttgaagttggctttccccaccacctccaggagtgctgatttaaggggatcaagcccttaatcccagagattaggatctttgccagcagcaccagtacagtccctgggtcagtggaaagtcacataaagtacaaaactctgtttgggtttcctgagttaattatcctttttatttgttgtctttctgcaaataggaatatccaaaggttgcagaggctatccatgcccctgaggagcagcataatggcactgcctgccatgcacacctcgaagtgccagcaagccacccctagcctgttgggagcaagccccccaaaatctggccataaactggccctaaaaccggccataaacagaatctctgcagcactgtaacatgttcataatggccctaacgcccacgctggaaggttgtgggtttatgggaatgggggcaaggaacacctggcctgcccaggatggaaaactgcttaaatgcatcttaagccacaaacaatagcatgggtgatctgtgccttaaggacatgctcctgctgcagttaactagcccaacctattcctttaattcgcccatcccttcgtttcccataagtgatacttttatttaatttaacatctatagaaacaatgctaatgactggtttgctgttaataaatacgtgggtaaatctctgttcggggatctcagctctgaaggctgtgagacccctgatttcccacttcacacctctgtatttcttaattcctctagcactgctgggttagggtctccccgactgagttggtctcggcactagtctgtgtccctggcttgcccttccctccaactctgtcctgcaggatctctctctctcattaataataactagcttttccatatgagccatccaactctgtcggctgggaacttctaccctcattgccttctttgggttttcagacagttataggagtcagagcagatattcaaattctcattttacaggtgagcaagttgaggttctgggaggacataatagttagtaggtggcagggctgggacttgaaagcagaacttctgcctccatatctgtgcacacagcaccacctctgcagtccctgtaccatgattttctttgtgccttgctctctgttgttttccagaacagtccttagaggtaaagtggacacttcatctgccttaccagtgcccatgcacgtcctcatcttccttaccaagagaacccagaactggttcagagatccaggcctcccacctcaggtgactccaccctcagactgatctgaggataatcccattccccctaacaatgggaagggccatgtgaaccaattctggccaatgagagagggaaaagagtctgttaggaaacttagggaaaacctctcctctcttctaagagactcataagaagagagcttctcttcctcctctggacgctgtcctgtgtgtagcactcaggactgctgaagacatctaggtaacagcttgaaggtgaaaccagcactgaggtttcctgattcctgggtggagcgcagactggagcctaagccctgacagcatggtgagtgttgactgtcacacctggggctgattctgaacttcccatgatgtgaactcaggagttttcttactgcatatgcctgttagaatgtggcttctcctcttgtagctgggagcacccttcctggctgggatcagcctgcaggtgcgctaagccctcctcactcagctctcccttcccttacgtctttctctgttactctgcctctgtccttttgtcaggagggcttatacatgaaggggaacttgaagtacagaatagatgggagttctgcctagctcaggacaaatacttggaatacttgagataattgcattttgtttgtttggttggttttagtgttaagattctttgtggtggccatattacagccttgggaatggtagatccttttatttttcctataaaggagccaccccttccacagtccctgctgggcccttccctctaaccaaggctcagctgattgaaccaggcaggaacacccagctccagagagaatcatctgggctgccagctgtccatacattgtggctgctgttaatagaaaagatgagtaggcaactacaagtttgtcatctgaggactttgaactaagggcacaaaacatgttattagccagtggagagacagacatacacagacctgggagagcatgggcagctggatgtgctatagtatattcccccttacagcagaacagtcatagaaggtttgcaatgctcctgagccacctggaaccccaaagctctttcaggtccgggcacagtaatctctatctccaggattccctttgccacccactccttgtgataatctcccatgatttaagatgtcttccccctgcagctagacacccattccctggcatgacacacagggccctccgtgatctttcctgactgtgtcccctgctgtctcaacttgctcctcttaactgcattgcctccactcctctacacatgccacatccttccatatcttcctgccttggtttgtgctattccctctgcttggaatgcccttgctctttttcccctggtgagatcatgttcatcttccagaacccagctcctgtagctccatgattctttcaagtagatatgagtattcctttccttgttttctcttgcatgtgttcattcaaaatttatgtatttagtgcctaccatatgtgctgttatgactatgaaacaaggctggaggaggaaagagtggcaggattggggtggctgtggtggctgctttagtgagggccattggggaagtctctgagctgagatctgaaagcggtgagagagtggccttatgaaggtctgagagaagaccttcatttctagcagagggaacagaaaggtgaaagccccagggtgagaacaattctggaaaggaagacagcaagcgtagctggagtgtagagagtgaaggtgcgtcagaaaatgggcagggattaaattatacagagcttgatagcctcactgggccactgcaaagaatgtgaatttggtctaagcatgaagggaaattccagggaagggtatgagaggagcaagtgccaggaactgatttgcattttagaaaggttcatttggctgctggacagtgggaagggaagagtaaaaacagtattccaggcaggatggtgtctctggagggagaagcgtggcaggcctggggcctcctgtggagggagagtcaataggacttgtggacaggctggtcgtggaaagggagggcaagggatagactggaattgaatctcagattaaggcctgagcaattgggtacatggaggcaccttttactgagatgggaacaagtgggggagtgagtttggaggtagaggtcaagagctgggttaggacctagaacttgtcaaccatactgcaagactttgctacaagtcccagactccttgaggggagattccatgcattttttttttggtctctctcccccactctacatagcgcaagtcttcagaaaagaagatacttagtccattgttgatgaaggctttgacttccacaatgtccttattactgaaaaattgcaaatggtacatggatatccttcttttcattaccttacttggtcaccaccaagccattttgtttttatatttgattactcttcaaatggcagtaacatcatccctcagtcacaagtcaatctgacctccctccacacctatgccctcctttggtcctctcacagtcaaacatgacccaaatgggtgccaggggagccctccagttagagacttgtgctggcaggtgttccattagcataccttggttcaggaagatgtgatagcttgttcccactgggttatgtcaaattgaccaatcaatcaccaaccatatactgagcacctttgataataagcccttacctttggcttgcactttatagcttacaaaaagcatttttatatatccgctcattggacttgtgcaaccaacctctgaattgatgaggcaaggtctctggatattaaattccctatttcatttcaacttccacatcttgcaactaagggtcttaaataagactgttccctctgcctggtgtgttcttgtccctctcattggcctggtaaacttccggaaatggtaccttccagaatcatcttaagtatgaaatgacaccattcacgaccctcgagcagagttaatcattcatcccttccccctctgtgttatatgaggctatagggatatatctgcctttttattaccctctagatatacataaactatataatacatatatacatacctatctctctaatagataatattctttttgaggggaaggaatgtatttcacctcagaatctcaatgcctgatatattcctttacatatagttagcaatcaataaatcaatggccatatgggtgttcttacagcttaaggtcatattgtggagaactgtgtatattttgctaagggatatggaactcagcctgtaggcataaaatagtcaatgggagcttgatttatatcacgaaaggcagatggcaggctcatttcatagaatttatttccctgaaaattgatgagttttgatttatgtcttcccttgaaggtcaggttatggactgttcaactcactttgcctttctctctaccaagggtttcatgagaataagatggtggagatggtgtcagttatacatagcctgtttgtttgtctcacccaggaagtttcatttcaacacatcaaattttcattgagcatctactgtgtgcctggcactgtggtcaatgccgtgataataaggcaaggtggttggggcgccctttgcaaaagccctggaggtggggcctgcaaggcatgtagaatggtgacatgtctgagtcccctgtcgtgtagccttcattccatgctgttgtgatctgttcccagggacttgcagctcaagtatatctgtgcttcactggaagagttgaaagagctggagactgtctgtgatcaatgagcccctgtcactctcatgacactttcctgaaccatttcaccagcactcaggtgagcctgcaataatgggctgatgggatgggcccacagggagtgaggcagtggagggcagcagcactgatggatgttaagcatcagaacggcccactagaagacttaattgacttcttcaggctcttccttcgtgtgcacttattcatccatccatccatccatccatccatgcacacacccagctatttattctttcatccactcattcatatctttagcttaaagcacaggtctgcctcttctttttggtgcatatcatccatccatctatccatccgtccatccatccatccatacatgtatccataattcatccatgaacccttaattcatttttaaagcacatagttccttgctcaaaaaccctgactggctgtcatgtgtcgcatgttagaagcaaagttgcctgtcttagcattcccaattagcctatatttcctgatcatatctatatgaacccttccttagctcactttcccctggggcaagctggatttttttctcctctccttttctcccgccctctttctcctttcctctgtgccctccccatcactcctctccacctcttgtttgttgcagtccaactcttcattcacttaagtcttcacttcctcgtgtgactgtcccctttgctcttgcactagctgtctcctgggtgatctaccccttctctgaactactaaagctgtcagcatctgactcaccctttgggtttttgacttttgtgtccttaaatttatctttttataaatgtggtctttctcctccaagaatcctgcctttcttcagtcctagtaaagactattgcctttgactctatcccatctagccttgagcccatcaggactctgagaaatcaggaatgagtcttgatacttcaagctttgtgcttctggctcctggcctgagtcctgggcacctgtgaggctctgctctgaagcctttattctcagaccgctgtacttaaaggaagggtgcatgttaggctcacctagaagcctgtttggctttaacacttgtgtcattctcctgagccccagcactgggatgcaacctgtccccttaccccaaatttgatgagcattttctgtgaattgattagtcccagagaaccatatcactgctgtgtgtgtgtctttgagtgttaccattttagttacttcttgctgtgtaaccatttcaaaacctactgtttctcatgattctgagttggttgggtggttcttctgctggtcttccctaagttcatttaggtgactaccatcaatttaggagctccctggatagccttgcccacgtgtctggggtgaagtgactggaatggctgggatgaccaggcctctctctctctccatgtggcatctcatcctcaaggaggcaaggctaggcttctcagaatgtggcaggctgggagttccaggagtataaacgcagatgcttcacagaggcctcagctctggaactcacccaacatctctttcaccacattgttggtcaaagcaagtcacaaggccagcccaggttcaagagttggagaaagagatttcactcttttgatgggaggagatctaaaatatcgggcccagctttttcaattccccacctcatctaccctgttccattcaccagactaatctcccccagaagcgtacaccattccagattagtcccaagttctccactttagagatgacatataacaccctgggctatgacctcaggagccctctttttacctcactagatcatctcgactctcctatacactctgtgaggcaggggctatgtctagactctggcaactgtctgcacatcatcctgtcgcatatttttcagagcagttattactacctaaacttaacttcttgttgttttgttcacttgtgcattgcctgttttccaccaaaacaacagtttcctagaggaactttgttttgttcactgattaatcacagtacccagaggtatacttagcgcagagtaggtactcagtagaaattttctgaatgagtgaaatgtccccaaagactgtgatccagcctcaaacccattgataacccctctcccagctcctgtcactggcagatgcccagaaacatgttatttaggacaatttattcatttatcacacataaatgtgtgaaatgctatgaaggttgtggacagcctctttgctcccatttgataaatgtttacaagagtcttctatatgccctgagagtgctctgctccttggaagtgtataatttgtttgataagacaaaacttgaacatctggaaagacaagaggatgttgtctgtttcattcaaattccttcaaagcagttcatctcggccatttgcatgtgtgctgggtgcacattttttaaaaagagcaaaaaccctgccaccactattagcactcatcaaagggtttaccagcaatccctcaagacttctcaggctcttgtttagatggggttgttcactgaggtgaaattccaggtgagaggagatattatatttctggcattttctctggcagaagatgaagactgtgctctacctgttccttctctgaagctagaagatctggtgtttcgactttgccccagccaactgaccacattgagtgatgtgcttagtttacactgaataccaagagatgggtgggattgctgtgcatatatattagcaggattttggctggaggccacttgtgacctctattgaatgtaacttcctcactcaggagttgatatggaaccactcactcctattggctcagtgcccagaaggcctcagagagagcccacaagatcaacccgacagaccccggctttccaaataaagaaacgcaccccccccaccccagggtaggggtctttgtgggtcctgcctacaccctcctaggattgctttcaggggctcagaaaattagcagtgatgtccatggccactacctgagcagcgtatgcttccatgtgaggccgggttatggcagagctgtgatttgtccttggaatctaggccacatccccaacacccataggcttccccaagcatggcaaggaaagggggactcagggaacccactgcccttaccacaccccaacccttggtcataaataggggagttctgaaactgaaggtggtgagctcccgcctccagactgaagtgatgatagaactcagtgcctctttatcttcagatcaaatcttatgacaccaggcccagccgcttacctgaatcaaggctgagtcagtgtgagtaaataggaccaatggtcactcccaagtagaacactaagccacccttaggagatctgcacgaagtgatgggcgctgtccattgtacctgctttgtgccttcccctgctccatagcctggcctggctggaagcacacagctgtcatctctgggaacattccattctctgccctcctcctgccttcaaccatgcacactgcctgtgacctcatctcctctgtcctcagggactgtcacaaccatctgcctatcatattttggagttgactatgaaatgaacaaggatcctgaatcttagttcttccagaaagatagatttcctcttatggtgtgaaactatggtcttcccaaaacgcacaggtgccaatcttcagaggggccacaatgtcatcatgaaggtgaaatatgggcttcatggtacacgtttacctggataagcatggttcatataaggaatccagaataagatggactgaagattccctcaggactcctttctcagatttcctgctccaacctgtgttaaagggggccactagaccatttagaataccctgctattttctttgtcatttaactttatttataagtatataaaatatagaaaataatacagagaaaaattaaacaaatacccacggcccatctcaggaaatgaaacattataaatacaacagaaggcctctgtgtgactctcctagatccaactccccatctaccttccctcctcagagataaccaccacctgcaacgaatattcccaagctagatattatgcttccagcacatgtgggaaagcaaacatcagcttggttaacagttttgtttgcctgctttaaatcttgtttttttgttttgttttgttttttcaagacagagtcttgctctgtcacccagcctggagagcagtgtcatgatcttggctcactgcaacttctggctcccaggttcaagcgattctcctgcctcagcctcctgagtagctgggactacaggtgcataccaccacgccccgctaatttttgtatttttaacagagacagggttttgccacgttggccaggctggtctcgaactcctgacctccggtgatccacccgcctcggcctcccaaagtgctagaattactgacatgagccaacacacgcagcctgcctgctttaaatctttatctaagcaaaagtactatcttcagaatccactgtaactttttctgccctcaacatcaagtttctggtattcagccacgttgatacaggctgcttactcatttgaccatctccttctcttttggtggactgttagggtgtttctaatctctcactaccagagtgccgctcacttctcctgcacagggaggaggagctctctaaggtggttctgttcgtttaggtgtatctttgacttaactaaataataccgaactgctcttcaaagtgtttgtatctgcattagcataagagttaccattgctctaccatcaattagtacttggcactctcagattttttcattcctgttccttggatggtgggaaaatggcctttgctcttgctttaatttgcattcccctgatgatccaccaggcagggtgtatttcatgcctattgaccatttctgcttccacttctttatcttacctgtccatagccttgtccattttactattgagttgttgatctttttcttattgatttatagcagggtttcttagcagtagcactatcaacattttagactggataatcccttgttttggcaggggttgcgtaggggtgctgtgctgtgattgaaggatcttactagcatccctggcctctactcactacatgacagtagcaaattctctcccacaacagttgtgacaaaaaataaaaatgtttccaggcattgccaaatgtcccctggggagtaaaactgccctcagttgagagctgttgatttataggaacactttatttttcatagatgttaatctatttttagccttacaaattgcatatatctttacaaaaatattctaggacagtcaatagatgtggttcctctctgtctcaaaaactttgccatggagagaggaagatagaacggcacatttattgtgtctgaagagctagtttgggtggtctctgtttctattttttttttttttgctgcagatctacaagatatgtgttaatattcatattttatagatgaggaaaatgaatctggtaatttgcccaaggacactcaaccaataagagtagaaactggtacagattcaggtctgtctgtttcagcagagtggaaagaaggtggcaccaggagtggggaggtctgatcttagtcctggctctatcactagctggccatatgaccaacgcctggcctccacacgtcagtctcctcacatgatgataaaggggctggacacaagatctcaaatgttccagcccattctaccaacagcagagtggttggctttgccactacctcatgagtgattcatctctgaatctccactccttgttttcctcatatgaaggtagagatgcaaacagcactgagtccccagggcttctgtaagcattcgacgattcatgtaaagtacttaacacatagcacaagttccatagatgccatagactgtcattataattccataaataggagaccagttagtctggattgggaagcactgtgaaatgtagagtgtgatataaaggaatatttcactacctttaggtataaataataacacccaggaagagttttgtcaataggtaactctccttctttgaaaggtgaagaaaggagctctgtgacaagcttgtggcttatatggtggtggtgctttgaagagttactcaggcctacctatggtttgtcctcttttccaagagaattggcagctgggcagtgctatctgcaaaaactgtacggagataaatgttaacccaggggctcccagaaatcacaggatatgaatggggctctaaatgcatgccttgctttcctctccatgaaaactgtatttgaaacaagtgagtcaagctgctctggactcggtaggtttcatgggcagaggggcaggctatcagcaagcagggccccccttcaaaagagggagtacagagaggcaaggggctctttaaacatgcatgccaagagagcaaacgccccacagctaatggctctgcaggcttagaaaggggatgcctgcagagtttgcctgtaattagttgttaacacatgaaaataaaagccgatttggaaacagagtccatcatttatttatagcgatccaatgcaagtattgttttaaataaaaaactggacacagttcctagtcagaaccaaaccattcaagtagctccagatttacctcctcactcactcaccttctctctaccttttcttagaagtccgcctagaccagactgacctgcctgagccctgcaccctttggctttcaggcttgcattctgccccagactgttgtgcatgactagatcgtgcccctgattccttgcacttgtgcctctgtgtgtgtgctggtgaatgaaaagagcacagacttcagagagaacccagttcaaatcctgtttctagccattttcagctctatgacctcatgcaaggccctctccaagcctaggcttgttgtaattcaggtatagatgtgactaggtatggggagcccctagtatgttgcctagcacatagcaggcaccctcattccctcctggccaaggtctgcatctttctttttcattcattcttaatttatggcagaaaaatcagaacagcatagatagtacaagttctagagccagattgcctctctgtgttacttcaagtgacttacttaggcttacagcgcccaatgtcctccaatggaaagtgggaatgataccagtacctacctcacagggcacctgtgaaggccaagtgagcacttaataagaactcattgcaatccagtgctcttggtacaggcagtgatagcatgcaagaaggagatgttttctccttactccctacccataaatgctatacctggagtatggtgagaaagcaaagggcacctggttctttgagtctcacagacctgaaccaggatcataccgattccaccattgtgatcctggggaaaggtatagaacatctctgggcttcacttttcttctctataaaatgggagtatcaacagcacctacctcatagagttgttgtaagggttatatgcattaatatgtgtaatgcgctcaaaatagggcctgacatatagtatgttctcattaaacattaccttgtaacaaatgtatgacctctttgttgactttgagcctcttcattcatcttttctcctctgcttttccttcttataccttcctctggccagaatacccaactgctagggcttgagaagacaatgttgaagacagttagccctctctccattgccactgagtgctgtgtgatttatacacagtatcccagggaagcctcctattactgctgcaagggagggtcattttaagaggagtccaaggcttctggaacatgttatgctccctctgtggccccaggtctaagtgcagcccttaaattactgtgcagcttcagaagagactgaagcatttccttgtcagaaaacagctttgctccttctggaagggaatctccaggggagaggtgtaaaggaagaggagcggcgagcagggcagcctgacatgggattcaggtgctgctgagaggcctccccatgctgtggagacaacagaccctaccgtattggttctctagacccagtgcttcccaacctggcacagcattagtatttcctggacttctccccagaataaccaaacctgatatttcaggaatatggccctggaatgagcattcttaccaaccacaggggatttgggtgcagcaaatgaacaacagtggaaaagcagttcccctagcacctatttttaccagtcccctcattctctaaggaattagccaccaactgagagatgtcccagatatgactgctcagcctcattcccctcctctgtgttcacaccatgttccacccggcctgcccccaacctgtcttacaccaccatccgtgaaactcctacccttctgcctagggcctctccaaaggagagaagagaacctttccagtggcagccagtggtgtgttcctggtgcttgaggtgtgagttgaaaatgccattattagcatttttcatccagctgcatccaagcctggccacgcttctgttgcttacttgggcttccaatctccatttacaggttttgcacacagcgaggactcaaggactgtactttctgggtggagctgaatttctataggaacatacttcccgtctcctaaacagctgacttataagacacctttggaacccattctactggcagtttagagaccacctgcccttattttatttaactgaaccccttccactctactttgggccataatctctgattttaggaatgatgagacgttctgaatgcccttagaagtgttcccctatctactggtcattaaaagcaaatgacagcacagtgaaacactgtggtttagaagtttctaatcctggtagtaactcaagctgacatttcaattctctgagccttaatttttatttataggacacgttaaaccagatgatttctaaaatctcttcaggctctgctaccttactcatttacagtatcagtcatttacaccttagtatgaataaagactgaacaaagtaaaatgggtgggcgagacaattgggacggatagaagaataaagggacatagacaaaatggctaagggacaccaagaaaaaagttcaaacaagtttccttagggaagcctttgcctattcttgggaagatctttatacgtttggggttcagtcactatgtcattagactccatctctccccttatttacttcactcccccctcctcttccctacaccaactctacaactgacccggcttgaccttgacagagggggcactaatggcttttcaatacagccccacctggaaggtgctgatttcgcataatcctaagattagtctagtcacagttcatatagttcagggactgtaattaaactgtggagctaaacattggggtctgtgacctgaaacagtgaccgtggtaaaaccctgccacagcaggcaagaaaagatggatggggtcagaattctctagcttctgctgctgcatcctcacctggtcctagggagcaccttggaagcggttatagaatgcaggttaatggtcaggtgcgctgtctcactcctgtaatcccagcactttgggaggtcgaagcgggtggatcacttgaggtcagggattcagaccagtctggccaacatggtgaaaccccgtctctactaaaaatataaaacagtagccaggcatgatggtgggcgcctgtaatcccagctacttgagaggctgaggcaggagaatcgcttgaacccgggaggcagaggttgcagtgagccaaaatcacaccattgcactccagcctgggtagcacgaatgaaactgtgtctcaaaaaaaaaaaaaaaaaatgcaggtgggtgactcagatgttggctcagggcacactggaacacgatgtggcttggtatgtttacaaacctctaacactccgcctcattattctggaggggaaggtagaaaacaaggagatatagactagggctgcggggtacccatccagtttattcattcaacattcattgagaatcacgtgccttactgtgcccagaattgtctcctcctggtgggttctcggtctccctgccttcaagaatgaaagggcagaccctactggtgagtgttacagctcttaaagatggtgtgtcgggagtttgttccttcaggtgttcagctgcgtctgaagtttcttccttctggtgggctcctggtctggcagacttctagagtgaagctacagaccttcgcagccagcgttacaactgttaaaagtagtgcggacccaaacactaaacagcagcaaaactcattcagaagagcaaaagaacaaactaccacaccgtgaaaaacaccccttggatttcggcgtctggctcgggtgggctgcatttattcccttatttggccccacccacatcctgcttattggtccattttacagagagctgattggtccattttacagagagctgattggtccatttttcagaatgctgattggtccgtttttacagagtgctgattggtatgtttacaaacctctagctagacacagagtgctgattggtgcatttccaatcctttagctagacagaaaagttccccaagtccccacctgacccagaaggccagctggcttcacgtcttattaacatcctgaactccagggttggtacccacagggtagtaagttgaccaccagaccactttatacagcatccaaactggcatggagaactcagactccattcagatggatatcaattccatctggatctaattaaatgcaaaggacccagcatcacaaatacaggtggcaggtaagactcaaagtcaggagtgcagcactgctgcaactctgggtatagagttctatgagagcagggctttgaccattgtggtgggagagatgtatgcaaagagggagcggaaggaaagagctggggactagagatctgagtagaaaccgcactacaggtggcatcagtatcatgaaagaatgcaaatgatgttacttgtagatgtgtgggtccccagggcccacactaggcaaattggatgatgggtctgttgcactaaaaccaatgccaggctgcactcatgagtgacgctgagggtcctaatggctccctgcacctatcaggttagctcaggattaggaggagttaagaatgagagtgaagactcaatgaccccagctcagcacctcctcctcactcttgtttttgtgaccctggggtccccaggtacttcgtcagtgggatctcactcttgctgcgtctcagctaatataagataaggtggtagtaatgtcttattgtagcacctccccaagatatgaaaaataactaagttctttttattaaatggcttaaaggcctatgggatacaagcactacaagtgtaatagtgtcatctgcataggggcacctacccagggttaatgggccacggtcatgtagataccacctttttggtttatgcggtaggcaaaatttttaaaatgtccccatcctcaagatcacacctctaatctctaggatctttgaataggctgagataccacgtccatgaatatgttacatttacagcaaaagaagttttgcagatgtaattaaggttactaattagttgaccttaaaataggaagattagcctggattatctgggtgggctcaatgtaatcccatgtgttcttaaaggcagaagaggaggacagcaggtgaagtcagagagattcaaagcacaaggattcaactttctgttgctggccttgaagatgcaggaggccatgagccaaggaatgcaagcagcctctggaagttgaaaacgacctaagtgctcagtcctacagctgcatggaactgaaatctgccaacaccctgagtgatccggaagtggattttctcccaaagcctcctgataggagccccagccagctgacagattgacttcagcactatgacatcaaagagcccacccaaggctgttactggaaggagggccttgagtgtaagttattcagtttcttggcgttttgaacaaagacttggacaaaacacacaaagtaacaaaggactgaaacataggaacgaagtagggaaagcaggaatgtattaaagtgaaaaaggaccccacagggtgggagtcggcccaagcaggtggctcaagggcccagttgcaaagttttctgggttttaagttctcctgttcagattcctattggctaccctttatctggatgaagaatttggcctgtggctaattaaaggatgaagtgaattggtgtcctatgcgatgaagggatggtccctgcttggtcctcggcccatcgaaggcactctccctgtccatctgagacattgagtagcctttgctcctttgctactctggagcggggaggtggggtttttccttttggtttagctttaggaagttggtttaattggccttagcttccctgaccgtagacccaggtgctatccttttgattcagctttaggaagtcagcacgaattggcctcagattccgtgtccccacaccttggtgtttttcctggattcagcaccaattgtccttaagttccctgcctccagacccttattctccttcctgaagacagcttgaacttctgacccacagaactaggagctaataaatgagtgtagttttaagccaccgagtttggcaatttgttacaacagctgtcgaaaatgaatgtaatctacaaaataggagactgtcacttaggggagggacagtaatgcgttgtgagcacctggagggcagaaactgggtgttatttatttggaggccttacagcctgatatgtagtaaatgctcaataaatataagtgaatgaatcaatgaataaatgttaaaaggataagcaaaggagccaggctcagtctataaattaatgatttcccaaatagctgcagattccaggatgtgttcaaccgagaggcaagggtgctgagaggttagcgcttaagagtctgttgtctggagtctgaggtctaatctcagtttggtctgctagctgtgtgacccttgggcaagttacctaacttctctatgcctttatttttccacctgcaaagttaggatagtaacagtaactacctcatagggttgtcacaaggattaactaaaggatgtacctcaagctcttagaacagtggcttgccatagtaaatattcagtacatatttgcaattatttcacagatggaatcaaaatgatctgatttcaatttttgtttctccaacaaggtactcgattggtctccacaccccaccccctcatacacactcatacaccccctcatacacattccaaagcttcattttctcatttataaaacaaagagatgaacattaagaacattctttattttaaaaacctctgtcatgttaaaaagcagtgggcactgttattttaatctaggcaaagccctgtagttctcactgttgctggcttttcaaagtggaattcatcagcaaataacgttactaatgctgcaaatgagtggggctgggtggggttgggctggctctcaccctgccctccagatgcaatgagtgtggggacactggtgacttctacaaaggctcattgaaaaggtccagtccagcagcggcttggtctaaggtaaggcttcttttctcattgattagctgagcagggggagaggaagctattagttttattgttgtttttctttattggactcacaaggcctcaatgccataaacccataaaccagaactggatacaatctattcttaattatacagggacagatgatctgcattacaaattgtccacagcaaaccttgctcactaattattgatgagattgtcagtcacttgccctgcctaagctcatgttggcataaatggccccattacttactgcggacttagaaggccttatattagaaatgcttatgtgtggacatttctctgcctgcctccctagaagagaagttgcttcgcagtgggcactgtgctatctatgaaacacattgaatgtatgccccaaccatgaccttccttccagaacagaggaagggagccaagccagccattatagctatgtctgtattcagctctaagcatcaggacccaaactccaagacaatgcctgtcctgtttaggccagtgttttgcatcggtgtttagggaaaatctctataatagaaactatagaaggagaggggactgtcttagggcatgtcagaacatgcccagattatttcatagcccatagcaccgaacataccaatgttcaagggtgagcactcaagcagcttgtgaagccccaggtaaatgatgctcagctgccacggtttcattttattcagtcacagcatgggcaattaagaataaactgcatttgatttctctgtggttgagaaaggatcttgatgagatgtcatcctggggctgagtgtgtaggtcccaggcagacatgttctgggctcctggagctgagggtggggatgagcaagcctctgcttgggtttatctcagccagagctacaggccttttggattgttttctttcctgtgccctagccttgaactcttggcacagttcggaaatccgttttcataaaaccgatttatttttccatttatttgattaattgaaattgctaatactctggcctctaggtcataaacactggataataaaaccccctctacatctgtccagtattttagtgttcactaagcatttcacatccatcatctcaaaggtaggcagggaagggatcgccatctttagttcatggagagggtgacatgtgttgtcaatgattacagttagtatggagcagagctggggctggaagctggttcttagagtctgagtctagttctcttgtggggtggctaacaagagaatgaatggctcttgttgaaattattccagtttaccccaggactgagttgatttttaggatctgaggcttttaattttaaaactgggtaagttctgggcaaattgggaggagcttgtcactctacttcagaatcccagggtgtctgttgtgatagagccctgtcacctccatcaggttcaggggagggaggtggcatgtgacttggcacaggtgaggcagatgttgtacctggagcagccaaccagggctgctagctgagaacagccagaagaaccttatggatgatcagagagtggcaggagatccatctaagtcagatcttggggtggggtttgatgggttgtggagggacaggaggtactggtgatggagtgacccctcctgcctaggctgcttgtggagacagttcgtaggagaaggattcggaagcctgagagtgctgagccggagaggggacactaacaggaactgcctggcaagaaagacccatgagagagacaccgatggcctaaagacaaagacagggcagaggcaccatggtggattgatgggatgatgggggatggagggaaaacgtcagagaaggagcagacagagagaggagggagggtccatgaggtagtttcagttggagaagagttttggggccctcacttgccatccacagaatctctgtccttgtgggctacagcctccttccctccagcctagagattaaacccttcctaataaaccagccaatctaatttagttggggtggaaggagagggaaaatgatttgttcaaagtggcctgagcctgagctgagtcttgagctctccagtccaggttaatgggcttttagccttgaatcagggcaagagccaggcaggccacgtggctcatggatgtactcccttgtcagcctcactgtgtccttgacccagtcccaggacctctggccctgggaacttacatgccttccccagtctctgaaggatgggatctcatgtcttggttccattcccttgcttgttagcattttgcctttattaatttgaagaaattcaaatcttattgagaaatcattaagttaaaccaaacccagaacaaatcaactgagtagaaaattgcagataccagctgcactttttccttcccacccagagtggagaaaggactgtttttgtgattaccacagaggcaagcagggagagtgaggcacctgcactgggcatgtggtcaccatgtgactggccagaaagccccaggagttggttgcaatatgggaaaccgtgtaatgctgcagggaatataaataagacagaaggaatcagctaacagatgggatttcttatccttttttgttatggcaaccaggtaggatgttataacctgcattttagttttcccttctgcccgctagtctcgatgttttatctaatttgtagttttcttagtcttgatatatttaatttatatcttttactttattacatatatgtcttgaaagctgcttcaaatcctctgtggaacaaagtgaggaataaatatacagtctgacgagcctctccactagtgtcctttttggagcgtagtgccacagtataagactaagtaactagggaagaaggatggcggagtggtcatgcatgcctccgcaataccttgtctcagttggtgtgcagaagggggcactcagccacctctaagttgtgccagtgcttcctagactcaggagaagcaagtgaacatggctctgtgtgagctggcaaagaagagtgtccaccgcagctcttggctcctggcgcaaagtcaccctgtctcaggatcttattgaattgtgatttcatgaatatcctcataaagaagccagtctatctttctggagcttttttctggagcttctgggttctcatattttatattctcagtctgagtttaccatctaggggggcagggggacctattgtaacctgctcgggtgaattgagatacgtcttataaaattcttgggttattgcaatagcttcctaactagcatctctgcttcattcttgcctccctacaacccactgattgatcattaaaaaaatgtaaatcatcactatgccacttccctctgtagaaccttgcattgctcttggcgtaaaatccatggttcttcccaggctttcaagaccctgcgtgatctggaccctacatattcttgtctcccttgtcattcttcttttggctttctgaatatgcccaatgtattcctgtcttgagtttttgctttgcttcttcaattattattgcttgttacaggattttcctgtttcttcatgtagtaagttctttcttattctttaggtctcaaatctcatcttagacctgccttctctcccaatccatctaaactggctccatccctttcactctgctcgacctcaaaattatccatcacatcatgctacttacatccagcatttaccacgatctgcaattatcttctttattttctcatttgttcattatacacctctctgagcagtatataagcttcagagggcagagacttgatctgttttgatctcagctataactgagccacacctagcatctagcactgtggctggcatgtaggaagttcttaataaatatttgtgagattaatgtatcaatgacttaaaccaaaagttcacaaactatggctcatgaaccaaatccagcctgttgcctgtttgtgtaaataatgttctgttggaacacagcctattcacttacatatgttacatgattatgtattgtctgtggctgtttttggtgctaccatggcagagttgagtacttgcaacagagatcatatagcctgcaatgctggaaatatttactatctgatcctttacagaaaatgtttgttgacccttggcttaaaccataaccctaacaatggcttaatccatatgggtatttagcgtttcacttaatgagaaacagaagatctcagggtcagttcagtggctcagtgatgtcattcagaactcacagtcctgctattttgtgctcctctgtgctggaaatatcttgcctcaaaggtctaagatggctgccacagctgtacacatgatgtctttacacatcagagttgtaaggaaaaaggagtttagtgagagcaaaaactggctttcacatgctcagcgcttgcccagtgattgacaagaaggtgattgactgccatgattggcttagattggcttagattggccgtgattgactgccatgattagcttaggccagtcatgattcatgccttgaggttgggcataacacttgtagtgagcagagaagaaggcagacctctgtccacttgtatgaatgaagcatactcagtttcctcaaactcaaggtggttgtgattaaggactgaagttgtctactctctccccttgatagaattagaaatggatgggcacattattactcttttttccttttctagctttcagggggatcttctatctaatccttcaccctcttcaccattttcctcccactcgctcccagccttgaccatgtaacataacttcaggcaagtagatctcagctgacttcataacagtctcacttgattcagattttcctaagaggacagcctggcctcattataaagatttaggaacaccagttgggactgtaaaatgttcccaattctattccccaccagccaagtctgatgctttaaactccactatgcaagggacattttagtttaatgcattgttgttcagaatgtctctgttaaaatgaatggtattttcaaaagaccatgcatgatgtgagcttatggcttaatctcaaaggtatgacatcacatatcatcttggacaacagaaatcttgaccttgagaggagcagggagaatgttatcatggaaatagcacagaatcatgagatacctagattccagttcttgtttgtctgttgctctgttatccaccttaggtaaattcactttctctttctggacctcacctccctcatctgtttgatgaaagagttggattcagtgatctttgagggccctttcagctggtgaagagggattggccacacactttgtacagtttcatgtccacatcactgccttcattcactccttatttcttgagccattcttccgatccatatttattaagaactttccatgtgctaggagttttcctggatgctgggagggtagcactcctgctctcttgaagcttactgtcgaatggggaagacagaaagagtaaacaagtaatataacaccgtgagacaagtgtgaggaaagaggagacaagatcgcatcacaggctcatttcagtccaaggcagagagggaaggtgttaccttatacaaggggtcaagtgtggctccccagatatggagatgtttgagcctgaaggaagattctgagttgactaagctaaaaaagtgtggtgggagaagaatctctccagtaggggtattggcatgtgttaagaactgttagtaaactgtgtatcatttatgctatatcaggttcaccatttctcagtcaattcacttgctgtgtggcccattcaaaatgacaatggaaagaagaatcagataaatttaagaagaacctgagccaagtttatccaaccaatcaccactgggatcacagttaatatctatttcattacttaaataaacatatactatacattttaagcatgccacgtatatcagattcattgctttaaaatagaattatcaaattgtcacagtgtgctaggcacttggccagagccagagaagggaagtagaagaggacacagaccatagtctccaggagctcagagcttagtgtggagacagttgagaacattaacagcacgagtacagtatgttcccaggcacacagaggatgctgacactatcaggctggggccaggaaagctttcagaaggccatgagccccctgaactgaaattatttcttatttatttattttactgtggtaaaataaacataacaaagtttattgttttaaccattcttatgtgtatcattcagaggcattgagtacatacacaatgctatacaaccatcaccaccatccatccctagaaaccactcatcatcccagacagaaaccctgtgcccgtgcagcaaacactccccatttcccaatcaccccagctcctggaaacctcgattctactttctgtctctgtgaatttgcctactctagacacttcacataaatggaatcacacagtatttatctttctgtgtctggcttgtttcacccagaacaatgtccttaggattcatccaagttgtattacgaatcagtatttccttcctctcaaaggctgaataatattcatatatatatattcacacaccacattttgtttagccattcaactgttgatagacacttgggttgtttctaccctttggctactatgaacacagctgtacaactgtctacttcagtgcttgatttcagttcttttgggtgcatacccaggagtggaattggtagatcatatgataattctatttgaactgaattttgaaggctaagaatgaccaagcaagaggaagcaaacacacagtagattaatgccaagggaggatgcatttctgtggggtggtccacccatcatataatctctcacttgtccctccctcaaagagcatgctgtgtcccactgtggctgcaaccaccagctcagttcctggtttccctagaagtgcgactctgggttcattcaggaaaagagggtggatcatggtaccctgtgggacatgccctcctttcctatatccttccctacttccaccccaccaaggaacatcctgggtcttttcattcccctgcctacctcactgagttgttttgaagatcaaggggcagtatggattgaaagtgctttataccttttaaggcagtagtagatatttgtggccatagctgttgctattgtcattgttgtcctctttgttaggaccattgtgagcctccagtgacctctcctggcctgaggaagcaaagggggagtcatcccagccccctgcacaggtacttcatcatggtgaggaacaggtttcttatttactaccaggtctgctaggctcatgaaatgaagctcaggtagaacaccttcaatggctgtgtctctacaccacatcccaatctctacaccacaccccaatctctacaccacaccccaatctctataccacaccccagtctctacaccacaccccagtctctacactacaccccaatctctacacaacacctcaatctctacaccacactccaatctctacaccacaccccaatctctcctgacaccaaagtctataatgataactgatgaaaacagagattcactcatcacatcctgagacatacaaaggaagccaggctgccgttttcacttagagtgtccacaggtctgcatgggagaaaatttctagaaattctggagctgtagtcttctccctccaagagttggtttccaaagcttggtttacttgatttcaaacatctaaaccataggtactcaggaacagctgtgtgtgtttggcacattgctagggtctgtgggggtagagaagcccaagacatggggtcttagccttcagtctggtcattggcttcattccaacgtgctcaaatgcttgatgtctatttcctaacacctctgttcctgttttctgttatattctgctgttctgggctctgagggtgactgccatcctctgctaaaaggctgtctacttttaagtaactcctttgctttcatttgggaaagctgtctttcagttactggctgcctgtctggtttctacctatagtcaatcaaaacacaggaaactgtctgacatggtatatgataagattcggaattgtgtgacacataaaattgccccagagtccctggaccactctagacctctgatagttagtaggggtccagtttccccttaggctcagaatggcaaatagatgccactggggctgcatttctctgcccccagcagacatggttaatccatcttggtgcttttcagctgagccaaggcttggcttctgaccttttctcagtgcaaagctgtcggcagccgccatcaatcgatctgagttggcacttagagtatgtagcagacagctggtgtctcactccaatatcctttctgggccatccccccagctgctaggggtagtgggtctcacaacccaccattgcacctgtctcctgagaattgttctctgctggccctgataggagccacctcaccaggaaatgtctcagatcttatgtcttgactgatataggggcacaaaagcctgatgcccttgtctcaaagtggggccactctgtgatgctatttgtacatattgatattcctgggatcaagctgagaatgactgtagctttgctgagcccctctccttgctcggtcccccttccctcacatccttacagcttttgttttagtttgcttgcaccttcaacagatcactcacacaagaatcctcatctcagggtctgttcctagagaaacctgagctaacctaggtcatctgccatacctgccctgcctctgctcctatacctaagaaggaaaaatcaaggacaagaataaattgataatgtgcaaagtttcccattctctggctcctgtacagtaaacaaaccatcatcccacaagtgtcttctgggctctggactcgtgccaggtactgtggtgcgcactgaggacacaccagcacacaagaccaaggagggcccctcctcatggaacttccattctatcttagcttgcttttcctataccacttgcattatctgttccatgtatctctggatttcaggtcaccattgaccccctgctctgtgtcccagtgctggcattctgccctattctgacaaagatcatctgtccgatggttaacttagtcttaaccttggtgttcactagct

SEQ ID NO: 5696 - DNA, 117928 bp, Homo sapiens
  LOC117584 gene - 30362480 - 30440407 of chr17; NCBI Entrez Gene ID: 117584; Build 35; sequence includes 20,000 bases upstream of initiation codon and 20,000 bases downstream of termination codon of the gene
tccataccatggaatactttttagcagtaaaaaggaatgaactatccatatatgcaataactgggatggatctcaagggaatgatgctgagtaaaaaagccaatcgcagggccaggcacggtggctcatgtctgtaatccccgcactttgggaggctgtgttgggcggatcacttgaggtcaggagttccagaccagtctgcccaaaatggcaaaaccccgtctctactaaaaatacaaaaattatccaggtgtggtggtgggcgcctgtaatcccaggtactcgggaggctgagacaggagaactgcttgaacctgggaggtggaggttgcaatgagctgagattgcaccactgcactccagcctgggcgacagagcgagactccgtctcaaaaaaaaaaaaaaaagaaaagaaaaaaagccaatcacaaaggttacacagtgtataattctatgtacataactttgttcttgaaataacataatagagattagtggttgccagggattcgggattaggggtgaatgggaggaatgtggctataaaagggtagcaggaggaagacttatagtgatggaaatgttctgtatcttgattatagtagtcgtgtaaatctacatatgtgataaaatggcataggactagacacatcaacacacgtgcttgaatgctaggaacactggtgaaatctgaataagctctgtggatagtaccaacatcagtttgctacttgtgtgatatactatagtccttttttttttttttttttttttttttaaagagaaaagggtcttgctatgttgcctgggctagacttgaactcctggactcaagtgatcctcccaccttagcctcccaagtaactgagactacaggcccctggctagtacaatacattttgtagtacagttgttattattaaggtaaaccaggtgaagggttcatggactttttgcaacttcctgggaatctataattatctcaaagttgttttttcttgttgttgttgttgttgtttgttttgtttttttgagacagagtcttgctctgtcaccaggctggagtgcagtggcgtgatctcggctcactgtaacctccacctcctgggttcaagcgattctcctgcctcagcctcctgagtagctaggactacaggcgtgtgccaccatcaaagtttaaaaaaagcgacaaattttgggaaacgctatcaaggaaacccacaaacagctgggcgtggtgactcacgcctataattgcagcactctgggaggccgaggtgggtggatcgcttgaggtcaggagtttgagaccaggctggccaacatggtgaaaccccgtctctaattaaaaaaactagtcgggtatggtggcgggcacctgtagtcccagctactcgggaggctgaggcaggaaaatcacttgagcctgggaggtggaggttgcagtgagtagagatcacgccactgcactccagcactccggcctggacaacaaagagagactccgtctcaaaaaaaaaaaaaaaaaaaaaaaaaaaggaaacccacagggcctgagatgaaaaatgaagggagaaccttctgatggggtggcagaggcctctctggagagctgatctttaagagtggagggatgaagagagaccagagaaggcacatttgggcattccctccttaccagaagaaaacaccaggagaagcctcctggccagtgatgttcaaagacagaaccagtgcttgaaagaaatgtcttacttttcttcttggtaccttttcccctgtcttcctcctaacctcttgtgttgattttcttctcttctgccatcagtcttgataaactgcttgatgctggtctctatactggagaagtgactgaaattgtaggaggcccaggtagcggcaaaactcaggtacatgtgaggccagcagtcaggaggatttaggggtgagggtggtagatgcatagcccagggtccctgggggagcttcagcgtactaatgggttcagagcccaacagagagaagatgggtaataaggaatggggtcgggactcagcccatttgtgttgctggaatctgggcaaggtttggtggggagctcccatctggaccctctctgaagtgtcaagttcatccaatgcccccacccccaggtatgtctctgtatggcagcaaatgtggcccatggcctgcagcaaaacgtcctatatgtagattccaatggagggctgacagcttcccgcctcctccagctgcttcaggctaaaacccaggatgaggaggaacaggtaagggcaggatgctgggttccattgagattctgacacaggaaaaccccattatcccttaacattgtaagaatttgggttgaatagtcattccttgccttcaaacttgctgttctattaatacatctcgtattccttaagccacccctgttgatgccatcatcccatttgggatgctactcacactgattcttccaggaaaccctcccaactctttgcatgccctaaaccagggctggcaaacaccaagctttgtgtttccagtccatttctcacctgtgagagacatcactaatcagtcatatccctctttcctgctgagttctgagtactttacagctcagcacccaggcagccaccactgtgacaactgaccattagacaaagctcatttgccaccctggacctgagtccttgcatccaggtgcctcttccttctcagccttaccttgacccccctactccctcttatccaaagtccttgcttttcttttccaccgcttcaggcagaagctctccggaggatccaggtggtgcatgcatttgacatcttccagatgctggatgtgctgcaggagctccgaggcactgtggcccagcaggtgagcctgctgttctgcccctccttgcttaattcagctttctaggtgctatctctgtgggcaggtgtcctactacagactgtttggaaatgcagatgtgcaatctggtgactccaactatgcttgctactcccaggatggaattcccgagcacctaaatcacatacctcattgtttacatgttcatcttccctgctgaacagtaaagccccctgagtggaaggatcatgtcatatttatgtctgcattccccactaggtgagtgaggaatacttttagctgcaagtaatagaggttgtctgacagagacttgaagcttgaggacatttaattatgtcacatgagttgggaggttggcaggtccatgctatcagggcaatagatttgtgtgtctgattttcttgttcttcccctcatggttgcaaagaggctgccaaagctccaagcatcttgtcttcacacatccacatccatattcaaggcagtaaaagatagatggttcttttctgtacctcctcccttttatcagggatgaagaatctttctccagagcccactaatagacgtccctcttccccttacatctagttggccaaaatggggttatgtgtgtatcttggactaagacctgggcccaccatccctgaagtcagatttctgcccagtcgctgaacacattcagagtcatgttaatgggaaggatttagaatggcatttgggttggcactttgctactcatgttgggtgcttagacaggatttggtgcactgatttataaatgactagatgtggaggataccttaaagatagaatagtttatctcaaacttttcctctcaccccaaagcatgacgtgttcacacgggcatccccacgactatatataaagtcaatgatttttacaaactttagaacatataatagttgaacaagctgggagtggtggcccacacctgtaatcctaatgactccagaggctgagacgggaggattgcttgagcctagcagttggaggttgcagtgagctatgatcataccactgtaccttagcctggtcagcagagctagaccccgtctttaaaaaaaaatgttgaacaaatacttacctcagaagtcatagctggttatgacccaccagcttgttgagacatgaagctgagtagtgcttacctcacttttagagatgagaagagtgaaggccggagaagtgaagtgagttgaccaaagttgaccaaatatttagggcaagaactaaccttatagcccaaacctctcaattccagatcagaagactgtattttttactgtaggaccattagatgatatatcttctattattgcataataagttaccaaaaccttagtggcttaagacatagtatttcttatctcacagtttctaggggttaagaatctgagactaggagcggtggctcacgcctaaaatcccaatgctttggaaggccaaggcaggaggatcacttgagcccaggagttcaggaccagcctgggcagcatagcaagaccctgtcttaaaaaaaaaaaaaagaaaaagaaagaagaaaagaaaaagaaccagaatcaggatataagaagtaagggagaagagaaaagaagcatcaaaaacagtttaagtccagggaaaccaggaggattctcctgcttgtgtaaagacagaaaattatggttagaaagatggcacaggctaggcttggtggctcatgcctgtaatcctggcattttgggaggccaaagtggccagatcacttgaggccggatttcgagaccagcctggccaacacggtaaaaccccgtctctgctaaaaatacaaaaattagcacccgtagtgtgcacccaatgtgtgcacccatagtcacagctacttaggaagctgaggcatgagaatcgtttgaaccgaggaggcagaggttgcagttagctgagatcatgccactgcactccagcctgggtgacagagcaagacttagggaatttatttggaggcattttagatacggaagatgaggcctagaggcatgatctagaaggagacagtgaagtaaagagaaggctaaactcttcagcaaaggaagttaggaatttgagggtggtagttagcaggacaagggaaagaaaggagggagtcagaaaaggaaaagaagggccttaccaccatggtgggaggctggacacaggagagagatggctgctgagagatccatgaccagaggcctcaggactctctgcggagctttctgaaatttgatgactttaatgtagtttttagttattttattttattttttttgagacagagtcttgctctgtcgcccaggctggaatgcagcggtgtgatctcagttcactgcaacccccgcctcccagtttcaagcgattctcctgcctcagcctcctgagtagctgggattacaggtgtgcaccaccacgcccagctaatttttgtatgtttagtggagacggggtttcaccatgttggccaggctggtctcgaactcctgacctcaagtgatccaccgccttggcctcccaaagtgctgggattacaggcgtgagccactgcgcccagccactttagtgtagttttgatgtcctgtgatttaaaccctttctttctacccaagtcttcattgaagtctgttacacatgccaatgggacgagggagacattgctgctgatgacattctgtgatgcccgtgcagcttgctgtatttgggatgggggggctatttcttactagttttagatagaaaagcaagcttgtcctgtaatgtgtcctagaggctgacaggttcatgagtgcttcccccacattccttcaggtgactggttcttcaggaactgtgaaggtggtggttgtggactcggtcactgcggtggtttccccacttctgggaggtcagcagagggaaggtgagtgatgtggcagagcctggggccagtggaatgtgacctcgcctcccagctctggagtctggtctctggccagccccatccctggttccccactgccctccctctctgcttctcctcctcctgcaggcttggccttgatgatgcagctggcccgagagctgaagaccctggcccgggaccttggcatggcagtggtggtgaggaagcaggcttggccaatgaacttgatttctagttattgcgagctctttatttcccttaaatgtcagcttctgaaccccaaagtggccctttaggaaagggacatatcccagcttccctgggtcagctacagctttgcaccataaatagctaagggaatcaggaatcgtcttgttgtttttttgttgttttgttttgtttctacattttttctttttagtcaggtttattgaggtataatttacatagagtaactttctccttgtttgaagtttgactaatggatatagttgtatccagtcttgtgaccccaccaaaaggtcccccaggcccaggcaaccactgatctgttttccatcccaatagtttggccttttccagagcttcatataaatggatctttttgctattgaagtaactttttctgcttatgaggtagtttttttaaagtctgcatgcttctcatagaaaggatagaaaataaatatgattcaaatttgtcatcaatctccacatccacagaaaccatattaatatttttacatatctccatacaatactttttctgcatatttacttatacttttagccaactttctttctttcttttttttttcttttgagatagggtttcgctctgtttcccaggctggagtgcaggggcacaatcacagctcactgcagctcgaccttccaggctcaagcaatccacccgcctcagcctcccaaagtgttggtattacaggtgtgagcccacacttaaccagctttctaactaaactaacctcatgaaaaaataaaaaaaaataggccaggtgcgctggtttatgcgtgtaatcccagcactttgagaagccaaggctggtggatcacttgagcccaggagttcgagactagcctgggcaacatggcaaaaccccacctctacaaaaaatacaaaaactaggtggccttggtggcaggagaattgcttgagcctgggagatcgaggctgcagtgagctgtgatcatgccactgcactccagcctgggcaacagagcaaaacctcatctcaaaaacaaacaaaccaaaacaacaacataaaaaataccatctgagtccatttcctatgttttaaaatagattttttagaaatgtaatttttagcagctatatattttttccagtttcttttattgtggtaaaatacatgtaacataaaatttactatcttaaccactttaaggtatacagttcggtggtgttaaatacattcataacgctgtacaaccatcaccaccatccatctctataactcttcaccttgtaaaactgaaactctgtacccattaaaaataactcattttccccttccccagcccctgacaaccaccattctactttctgtatctatgctttttgactactctaggaacctcatatacatggaatcatatggtatttactttttgtgactggagtatttcacttagcataatgtccagaaggttcatccaccttgtagcatgtgtcagactttccttccttttaaaggctgagtgtctgggcgtggtggcccacacttgtaatcccagcactttgggaggctgaggctggcggactgcatgagctcaagagtttgagaccagcctggaaagcatggtgacatgtgccccatcgccttctggttcgggtcaaacctgaggcatcgagatttagtggaaagagcggggcacaagtcaggaggcccaggttctagttccagacctgccattaggttttgtaaccttggggaagttatttctctgtgctaggcctctgttttcctctccgtaaaatgaagcggtagtaatcgatgtcctctatactagcattatggatctgtaagtctgtttctgctgcaggtgaccaaccacataactcgagacagggacagcgggaggctcaaacctgccctcggacgctcctggagctttgtgcccagcactcggattctcctggacaccatcgagggagcaggagcatcaggcggccggcgcatggcgtgtctggccaaatcttcccgacaggtgagccagccccaggaagatgccagtaatcttgggccctggagggtggtttccatacccacagatgtcttcgagaagaactctttagaggctgaaaccttgcaactaaagaagctacccacttgggttgcttaactccactgactccttacttcttcttccagccaacaggtttccaggagatggtagacattgggacctgggggacctcagagcagagtgccacattacagggtgatcagacatgacctgtgctgttgtttgggaaacagggaagcattggggacccctcccaacttttcttcccagtaacgcctgctgtttactgccacctggcactggtgactacagacgttctcaggctggccagaagagacatcttgggttccttggcctcactctctgtaagcatataaaccacaggcgaaagaggatgctgcattgcgaggacccagaaattcatactggtgccacgtttccttcccttatttctaacgtgtatgtttctggtggaaaccaagttcaccctggctgggagcatctctgatgaggcatgctggcgactggatggataatcctgtgcatcaccattgtgtcctgtgctccctcctagcgcagtggccaagccgggaaagcctctaacttgcctttgctgctgctgccttttttttcttttgtctctgcctttccatttgttagatgggggcccactcttccttagctctgtctctgagttactgggtggaaataagcttataaatgaaatactcttcttcatctctgttttgctcttaaaaatataaaaaggcaattccccgagccctagagccacctgatttccccttagaaggctgtttttcagtttcccccagtgaggcccaaagaacagtttattcctcctttcctcttgctgatttggtttcagacctgcctgcatcaccatgactaggtgagaacgtgtgggctcgctgcagttccagggatataatttaacagaaagggagggtatgacctgctcctggtgaatccagccactcatttaatatgcatggtgccctgtggggcccctccacagtacagcataaccagaggtgctgaaccatggccttgcccataaacagacagaggagaatttgcacagtaaatagagccagctgggaaaattgatgctgacgtaaataatacatggcaaatctagtcctttatgcagaaattcattgctggtggctccaagatgcaatataattacacctctcttcctgccagctgtaccacagctagtgccctagtgtatgaaataatccctctgtctttcaccagcactgtggccatccgtctgagagccatgaccctggctgggaggggacgaagacaccagggaatggaaaataaaaggaaaagtacagaaatgatcaggattggttactggccacatcttttaaaggaaggtcatctttcttggttagagagcctgttgtgtaattaatcagttatgtcttggctgcaggaaaggagggtccgagttacactcagaaagtaatgacatttagaggtgatgaatgcaacagggatagaatcatggaggattgggaaggagtggcaaactggcaccagggtgttggattcaggacagggttggtaagcctaagcctgggggaatcctagcgcttgctttcacagaagacctcaggagaaattaatcttcagtatctttataccatgggtgattggcacattcctgcaaccacagtaagatgcaatacatgaagctggaaattgcaaattcttgccactcaaggtactatttgggcatcttcagcccacagcagacatgaccaatcgggcacaagcactcttttttgtggaagtcaaagtgtttttagaagtttttctcaatatagcactccagggggccactaccagtcagttggagttggtattcaaggtggagtctggttgccgtctctgccctgttcccattatgtagtgagttcaggtacttaatacctaactgaggaccctaggactgcagtttgagatcatctggggccaggcacagtggctcacacctataatggtagcactttgggagcctgaggcgggaggatcacttgagcccaggagtttaacagtttaaaatcagcctgggcaacatgatgagacatcgtttctacaaaaaaattttttaaattagctaggcattgtgatgtgcacctgtggtccctgctacttgggagcctgaggcaggagaatcgcttgaaccttggaggttgtggctgcagtgagccctgatcgcaccactacaccccagcctgggtaacagagcaagaccctgtctcaaggaaaaaaaaaatcatctggcccatcctgttacttaacagagaaggtacctgaggctcaaaaaggatgactgacagtcctagtggcagaatggaggtgggatctggaacccacaacttgattcctaggactcttttttttttaattcccacattggctgggtgtggtggctcacgcctgtaatcccagcactttgggaggctgaggtgggtggatcacctaaggtcaggagttccagaccagcctgaccaacatggtgaaaccccgtctgtactaaaaatacaaaaattagccaggcatggtggcccatttcctgtaatcccagctactcaggaggctgaggcagaatcgcttgaacctgggaggcggaggttgcagggagctgagatggcgccactgcactccagcctgagcgacagagtgagactccgtctcaaaaaaaaaaaaaaaatgcaaaaattagccaggcgtcgtggcgcatgtctgtaatcccagctcctcgagaggctgagtggggaggatcacttgagcccaggaggcagaggttgcaatgacctgcgatcatgccactgcactccagcctgggcaacagagactctgtttcaaaaagaaaaaaaaaatccccacattttatttaattttcagtccatacagttctattcctgctagggctgtaactccagctgaaggcaccacagctgtcacccaaggagtttctgtggccatgggaaggtgttgcattcactgctacttgagaccaccacgtgacattcctgcaggctgtgcccctcacagccagcttcatcctttggctcctcctagaccaggactttgtcttgcctgcctgctgccactgcactctgttccggccacaccacactgtgcagtcccctggtaggacttgggctaggctggctctcctgtccaagtgccttttgctccctttgcttatgtgtctgtctctgcccagctcccactgtgtctggtgcacacccaccctgacatccttttttatgcctcagctgtgatctagatagatgcttacagtaacttccctgtattagttattcacttgtactttctgttcacgtgtctgcctacaggctcccactttttgtcactttttctctttatacattatggaagctcagtaatgattaaatagatgaatgatgttttaaaaatatattttaaaaaagcaaaggactggctctatctcaggggttccttccataaagcgtcaactttcaatttcccctgcgggggtggtttgagacctgagggcactctctagttcttaggaaaaaaatatacatatacatatacatatatatatatatatacacacacacacacacacatatacacacatatatatacatatatatacacacatatatatatatacacacatatatatacacacatatatatacacatatgagccaggcgcagtggctcacgcctgtaatcccagcactttgggaggccaaagtgggcggatcacaaggtcaggagttcaagaccagcctggcctatatagtgaaaccctgtctctactaaaaatacaaaaattagctgggtgtgatggctcgcatctgtaatcccagctacttgggaggctgaggcatgagaatcgcttgaacctgggagatggaggttgcagtgagccgagattgtgccactgtactctagcctgggcaacagagtgagactccatctaaaaaatatatatatatgttcacacccacatcattgagtccccagagtgtcttcttacatatctttttacaggggactattgtatgcccttcgtctgacatcagatgaaattaatgttgagatcctactatgtgctagcacttgatggccttaattaaaaatcaggcatttgaattcccaaggactcaggcaaaggtccatgtatcattaaggctgcaagtaacaaaacctaggcttaaagaagtgtaaatactagggacacttatttatatttatttcttttatgtttcaagacagagtcttgctctggagtgcagtggcacaatcacggctcactgtaccctctacctcccaagctcaagtgatcctcccacttcagtctcccaagtagctgggactacaggtgtgtgccaccacacccatctaagttttgtattttttgtagagacggggtctctgtacgttgcccaggctggtcttgaactcctgggctcaggtgatctacccgccttgacctcccaaagtgctagggattacagtcatgagccaccatgcctggcagggacacttattatctctgataacaggaagtctgaggtttgttaatttagtggctcattgtcaaatggcgtagagcctttgcatccttctgctctgttcttttatgttggttttgtcttcaagcttgttccccttatgaaagcctggctgcagccattttgagcatcaatccagacgtgacaatatctacaggcaggagaaggatcgcctcctgtgtgtcctttaaagaacaaggtgttaacatgccaggaactgtggctcctgactgtaatcccagtaatttgggaagccaaagtaggaggatcgcctgaggccaggagttccagaccagcctgggcaacatagcaagaccctatctctataaaataaaataataaaaattaagaaaacaaggtgttaaaagacaaaattaaagcaaatatagttttgcagattgtaattgacttttatttgcaattctagaattgggctgccctcagaaccaggacaggttcagagaattccagagctgcaacatagtctgaaagcatttatggtcagaaaacagaaatgagatacaaagacaactaattggttacagctctgcctttgccttatttgaaaatggtttgaatagttggctgcctggaacccactgaagctgatgatgtgattggctgagcctcagcaatctgttacaaaagtatactcctaaattaggttttcagttagtttgcatactaaggctgcagtttgttaagggcccaagtaaagcctcctcaggtcaattttttttttctttttgagatggagtcttgctcttgctcaggctggagtgcagtggcgtgatctcagctcactgcacctctgcctcccgggttcaagtgattctcctgcctcagcctcctgagtagctgggactacgactacaggcgcctgccactatgtccggctaattttttgtatttttagtagagatggggtttcatcatgttggccatggctggtctcgaactcctgacctcagatgatctgcctgcctcagcctcccaaagaactgggattataggcatgacccactgtgactagccctcaggccaaatttagcttttgtttgtttgtttgagacggagtctctgtcacctaggctggagtgcagtggcatgatcttggctcactgcaacctctgcttcctgggttcaagcaattctgccgcagcctcccgagtagctgggattacaagcatgcgcccccatccccggctctttttgtatttttagtagagatggggtttcaccatgttggccagactggtctcaaactcctgacctcaggtgattcacctgcctctgcctcccaaagtgcctggattacaggcgtgagacaccacacccgaccccaaatttaatttaacaaaggactaactcagaactaacttccaaccaaagctgactcacctcaaatctcattggtgcagaattgcttcatacacccatgtgtaatacagtaactggcaagaaaaagggactgctgtgattgactcaaaccaactaggaaatagccctggagctgaggctggggacaggctttcctgaagcacatgctggagccactgaaagaaaaatgggagttctcctttctactagaaaggagagtgtgtggatgaactggatgctgggtgggcagcctctcactagtacttacggtagtaccaaagacgagttaatcaaggctctattatgtatccttaggcccttgatgcatgtctcattatgaccttaggacagccttgtggcagagggaatgattccatttaatagacagtaaatgggatctcagtgaggttaaggacataaagctaataagtggcagcacgggaatccagacacatgtctgcctgataccaaacccattttttcccatctgcacgctgccttctgctgtaaatatgtaaatgtttccacaaaattctttttcatactttgccctgatagcagcaggggctgcacatcccaacctcttttcagcttagctcaccataaaaagcgggatcagagatctacttctcagctctttctgatttcccccagggaagttacaaaagaatgacaaaaacttggagaaggcagatatcattagtattaaagagaactggaggtttagggggaaataaagctgaataaaaaacagcagggctggctgagcgtggtggctcacgcctgtcatctcagcgctctgggaggctgaggtgggtggatcatttgaaatcagaagttcgagaccagcttggccaacatggcgaaaccccatttctactaaaaatacaaaaattagccgggcgtggtggcgggtgcctgtagttccagctactcagaaggctgaggcaggagaatcgcttgaacccgggtggtggaagttgcagtgagccaagatcacactactgcactccagtctgggtgacggaacaagactccatctcaaaaaaacaaaacaaaacagggcctatgcatccctgagatgtgaagcagggggagataagggatttagatgtatatcctactaggtttttgctgtgttctgccatgcagttgtctgggcaggatttatttatattttaatttatttcaggggccatgctaatcatctttgtattgttccaattttagtgtatgtgctgctgaagcaagcactgggtaaggtttaaactgtctagttctgtgtgctggggtttggcattggagaaggctctgtgatgcatagaccttaaattagagttaggtatattattaatccaaagtgatcctgaatgctttctatcatttttttcttgtcctattgcactggctaaactgacttttagtactacacagaatagaagcaacaataacaatcatccttgtcttgttcctaactttagtggactatttacaatattttactgagttagatgccttaggttccacgtagctgctctttatgaaagacctcactgggttacccttcagtcttggaggagtctgggtattggccatgacatttgccatgaatgatggagttctctctgccaggtcctcatgccctggagctgtacggctgcacttcagctgctgcacatttgactttttgagtagcccttgaatctctgctcttccttggcctctctatagtttttggtataatagcctcagcttaagtttgagttttgtaggaaaacaatgggcctgtgctgacaaagatacaaagtcaaggaacaggattttttatatctcaactaacttggtcctagctttgacatttacttgccatataacaatggatgaataacagtctctttaagccttagtttcatccaccgtgaaatgggaaaaataatatctgtttcatagagttgttttaggatcatgtaacttatgtaaaacactgaatagttttccaggcatgatataggcactcaatctcatattatgaataagcttatgatgcatgggggatactgatgacagctttcttctgtccaggcaggcccagctacatggtggtatgaccagtgcagtcacacagccccatgcttagcagggctctgcacttagtttaatgctctgctgttgccatcttgaagttcttaatttttaaacaagcatcccatattttgcactgtttcttgcaaacagtgtagccagttctgtctccaggaatggatccagcactagtactggcccttctctttgggaaacatccttccattgatttcttagggagtaaatcccttgaagagtaacctcccatagaaaaattagggttagcaccctgtgtatgtttatctctaactgttccattctcagtaacctacacatcctctctcattaaaaaaacaaaacaaaacaaaaaacactttatattttacagaagctattagatccagagaggttggtaggggtgctggtgaaatggaatggtgatttgggattttggaatcaggaaaaagatctaagttcaaaaccctgctagtccctttctggccgagttacttggacaaggtaatgtctctgtcctactggtaaagtgtatgttgcaggggaattacattctttgttggtaaaatatatgcctcaggggaattaaacagataatttatgtaaagtgcctttcacagagagtctggcacatagtaggtggtcggtcactattaattcttccagctcttgccagaaataactaaaatcagggcactaggacttccaagccgtgctgctactaataaaagaaataatatgatttattttttcacaactgtttggggaaaggcctgtgcttcataaatatgcgttggaaagtacttagcaaatgagtagaaataataaaaatatgtccaagtaaacagctcctataaatatgtcacttggtagacaaattagtgttttatcactactaaatactattgctcgctgaaaaggatttcggattgcttgcacaatgggtacattattgaatgcctctgtggaagggcatgataaagatgaaaaatagtgacggtggtaatgcctaaggtggagaaaggaggagcgtggataaacgcagctcggaggcctctgtgctgcagtgatatgcacattatttagcagcattccaatgatttgcttgtaatatggaccagagggcccagaaaaaaatgatttccacaggatgtcatgaatccaaacttcaattattggatccaatcagtggattaagtgcaccccctttcagaactgaaccttcaggttgtaaactaagtttatgaaaggacatccccaggtctcaccccacccttgttctggacctattaactttttttctgtttgtttgttttttgttttgagatggagccttgctctgtcacccaggctggagtgcagtggcacgatctcggttcactgcaacctccacctcccgagttcaagtgattcccctgcctcagcctcccgagtagctgggattataggcgtacgccaccacgcctcgctaatttttgttatttttattagagatggggtttcactacattggccaggctggtctcaaactcctgacctcaagtgatcaggtctcccaaagtgctgggattacaggcatgagccaccgcgcctggcctggacctattaactttctataactatgatttctatcaagagaaagagtgatgtggtggaaaaggctgtgccttcatcacagctaggaatctatttcagaattgagaggatggacaaggtcctggcatatctagggaaaaggaattagagggaaaggaggagaccataaatgcctttggagggtagggctggaaatgaagacttagagagaagcaaaccagacagaattgcatcagggaaagttacaaaaatagccaggaaggaaaatgaagggtacatttaattcggatgtgggaggcctttagcaggtcagtctttccgtgcattccaggtgattgaaaaaatcagttttaaattccagctttttggggcgcagtggctcgtcctggtaatcccagcactttgggaggccgaggcggcagatcgcttgaggttaggagtttgagaccagcctggccaacatggtgaaactctgtctctaccaaaaacaggcaaacaaataaacaaattagccaagcgtggtagcgggtgactgtagacccagctatagggtgggaagatcctttgaacctgggaggcggaggttgcagtgagcggagatcacgccactgcattccagcctgggtgacagtgagactctgtctcaaaaaaataaataaattgcagctccgtgtattcaagacactgctggttgaaagaaaaaaaagcaatacattccagctccacctttttctaaccatgtagttttgggtaaattacttaatatgtagatcctcattgataacatgggaataatagtactcagtttgctgggttgtgaggattgaaaataatacttgtaaagtgacagagtctgatatgtatacgtgatcttattgttattatttctgaggcgtcgtctcgcccttgttgcccaggctggagtgcaatggcgcgaccttggctcactgcaacctctgtcttccgagtagctgggattaccggcacccgccaccattcctggctaattttttgtatttttagtagacatggggtttcaccatgttggccaggctggtctcgaactcctgacgtcaggtgatccacccacctcagcctcccaaagtgctgggattacaggcatgagccaccacgcctggctcatgatcttattttccttacgatattccttgtttgaaaatacaaattgttcagaaaaactaggagttctcaatagaacctaaagcctaagaaaattgtgtcactagacaccatttaaaagaaggattagaacttaatattatgttcatgactaggcatcgtagcccacgctggctaaccatcccctgggccgccctgctgcttggcggtttactaaccacagctacatgcatgcgctcactaaatcctcacgccaacctgcgtttctgggatgagaaaaccagagttcgtaaaggttaggtaccttgctgaaaggtgcatgggtgaaaggcagggatggatcctcgctgagtcattctcattctaccacagccttcctcagcagcttcctgactttcctgaggggaagtagctagtcctagcggtttagactgggcagtgctagagtgagtgggacaagcatgggtttttaggtcccacagacccggcttctaatacctcccagttgtgggacgctgaataagctcgtaacccctagtggggctgggtttctgcaatcatgaagcgggggaaaccatcgcctgctcatcgcaccgaggagagagtcaatgagacatgaaagtcaggcacctttcaaagttttatgacatgcgttcagaggtgttgagggactcgctcaaggtcaccaagccgggtcttgacccagctgaaacttggacctggacccttgggcgcctcccgcagagttgtgtgaccaaggtaaccagcagcggccgaccccacgactttggggaaacgacgcctcctacggccccacggctcaggccagcccggccccgccgtcgggagcctcagctccgccagggggcgcgagcggaggccgcgctcgaggccgccgggcgcctcgctcttctctatggtggctcgggcgcggcgggagcggaggcgcgatcccgagagggggcggggccgagtcaggggcggggccgcgcggagggcgggagcggccgggccgggccgggccggctggggatgggtgggagggggggccgacttcctggggccgcccgtgaggatgtcgcgaccgcccccgggtgcccctcagccccagagacgccgccgcggcggagtccgcagcctccctgcctgaggcgtccgcggccgggatccggcccctcccctcgcctcctctcctaggtgccggccgggagggcggccgcagcaggtgaggaggcggcggcggcggcgctgggggccgctgggcgcccggcctggggaaggacgggaagggggacggtcgggtgccgtcaggctgtggtctgggggcccttcctctgtgtggggcgcggcctgggactctccctgccctacaggggtggggggaagcccttggctggctggaagtccccgccttcagggcagcccacacctgtcctttgaaaagtcccctcaaagaaagcgtttcacctgtgggggcagtaacaggagacgtgcgtcctcgattatccccaagcgccctgcagaccggcaggtctagttggcttgtggggaaaagatacctctttgtacgtcagaagaaactgaggcaggtccgcggcggcctgcttacccctttaaaggaaccagcccgtccctatctccgtcttagaggaggcggctggaggagggaggtttggagtttggaggtttgatggagaagtttgggaatgcggttctccccgcagggtccactgttccctcgcttgggagttgtcctctgttcgcgatgtgtgtgaggtcgccactgtgcggcagcggtcaagaccgagagggaaatggggcctctcttcagccggctgcccaggagacagttgaccagacatggggaagtctggcgaaccaggggagccagagcctccgctggcacgtctgctcagagcttgagttcaggctggcagaagagataaacaacagcatatcattttctcctttttgttggtctgtcatttgttctaggggggaagaagactgcttgtgtaatcaagagtgtaccgtgcaccccccagtctaccataaggaaggataattgttagcttggaaatagggttttacccacaactgtctctttgctccctggttaaaggccagagtgacgtgatgagcaaacatcccggggtgcatgtggccttctaagaaagcagtgagttccttatgtatccctttgattattggtttggaggacagagagacttcctgttaaccactgtcgctgcaactgtttggggtgccttattctccccgtgacagttcaatttactgaaatgtgggccgggctgcccgtttattataccattcttctaggaatgggagtaggcaggggacaaggtactgggctgaatttgtgtacagagttctagggctgcagcctagccgtggcagctcctttctgttcaggggatttcaggtttgacaacttctttatccttttctctgattacattctctttcacattcaaggaagtagatgatggcaaaggtttccgaacttttattgtatatttcctaattctgaattttagagtacaattcagaagttacagtttatttagaggtattcttaagtttgaaaatatttgggtatattttcataacaattgcagattgatgtggcagggctaatatcttgattgtgattgaagaaaatgttcatgtaatctaggacgcactcattttaatgcccgtctaattacaaagaccagcctgttaaaaactttcatattgatcaggtagacagttgtgatttcttgtttacattgggatcaagggttgtaaatatttaaatcgaccagtttaaccagcctccaaaataacatgcacaaaaaaagaaagctcttctcagaaaccttaaaaatcaatttctttcaaaccttctctcatgaccaagccagttgacataactctgcttggtaccatctaataggaacaccttttttttttttggagacagagtctcactctgtcactcagactggcgtgcagtggcgtaatcatggctcactgcagccttgacctcctaggcttaggtgactctcccttctcagcctcctgagtagctgggacctcaggcatgtgcaaccacacccagctagtttttgtattttctgtagagatgaggttttgccatgttgttcgtcatgaactgggctcaagcaatcctcctgccttggcttccccaagttctgagattacagatgtgagccaccgcgccaggccggaacacctcttaagggttgtggaaaaggcgtttttagtgaccagcatttaagaagacaaaacaaacagcaacaataacaaaaaagggcacaatttcttttctaattacatgtgcattgttatttaaatacagtcacacccatctctatgagcgtcatgcctaagactttctgagaacacctctgtaaacctaagaagttgttagggggactaattccaccttgattttttattcttgtcatagaacctttaatactgccatggttttaatgatagaggcttttataccaaacttgtactagtcatagtgtttatgtttttggaggaaagatttaacctctataccttagaatctcataacttgttaatacaataacagaattaaggtattagagtttaatgagaacgcatagtttaaattactattggtgaagtctcaagtgaggagctgcttcattgttgtttggtaatggttactggtttaatgatgattactggttatttttgtttcacttctggttattggtaatggttatttggtgtttgtgtaagaaagattttggcaattgtaaagatagtctttttttttttttttaattgagatgggggtctcactcttgtcaaccatgctggagtgccatggaatgatttcagctcgatgcaaccttgcctcctgggctcacgcaatcctcgcctcccaagtacctgggaccacagatgtgcgtcactacgcccagctaatttttgtgtttttggtggagacagggttttgccatgttgcccaggctgatctcaaatgccttgagctcaagcgatcctctggcctcggcctcccaaagtgctgggattatgggtgtgagccactgtgcccagcctaaagacaagcttttcatatagaaacagactcccgggtctttcgtaaggaaatatctgattaacttcttattttgtgactttatattagttaagcagttttaaaatagtaaaactaatttggctcttagtaggatatcctattatatctcacataaaagccatctcagataggtaggaattggcctcatgtatttaaagacctctgccctccctgtttccaagatttaacagctgccatcaggacagcggtcatagctaatcctgttatgccagtcttagtttaaacccattatcctttctcttcgttaagactgtcatgaagttcttcctttacttttcttatgcagggtgaatattccacatttttaatgtatttgggcctgttaacattctgcagtgaagccaagcagttggttaaaagagtcctgcatgtttttaaacagtttcctttttaaagcataaaatctgcatcttggctgggcgcagtggctcactcctgtaatcccagcactttgggaggcagaggcgggtgattacctgagatcaggagttagagaccagcctgaccaatatggtgaaaccctgtttctactgaaaacacaaaattagccgggcatggtggtgcatgcctgtaattccagctacttgagagactgaggcaggagaatcacttgaacctgggagacggaggttgcagtgagccgagatcgcaccactgcgctacagcctgggcaacaagagcgaaactccatctcaaaaacaacaacaaaaaactgcatttcctctggagtaaaaccagctttttgaatctgataataaaacaaaagctgttttttcctgctctctactaatagaaagtctttattaactttaccttactggttttgttagtacagtgactagtgactggtagtaaatgataacctagtggtaatgggagatcctgaagtctcctgaatcatcaatgacaggtcacattgggttcagtgcagctttagccttttgagtatgttttattgtaaggagttccaaacgccagccactccttgaaagatgaggtacctggtgatttgctgctgagtcactgaccgagatattctttaaaaatgcagatttcccagccccacttcctggagattttgactgagtgggtaagtgatgaccagagaattaccttttattttttcaattttataatttattattactactatgaggccataccatgtagacgctaccttttatttttattaattatttttattttatttcattttattttgagatggagtcttgctctgtcacccaggctggagtgcagtggcgggatctcggttcactgcaacctctggatctcggttcactgcaacctctgtctcctgggttcaagcaattcttctgcctcagcctcccgagcggctgggattacaggcacccaccaccacacccagctaatttttgcatttttttttttagtagagacgggttttcactacattggccaggctgatcttgaactcctgacctcatgtgatctgcccgcctcagcctcccaaagtgctgggattataggtgtgagccaccacacccagcctatttatttatttttgagacagtctcagctctgtcatccaggctggagtgcagtgaggtgatctcggctcactgtaacctccacctcccaggttcaagtgatgtgcctgcctcagccacccaagtagctgggaccacagatgtgtgtcaccacacccggctaatttttgtatttttagtagagacagggttttactatattgaccaggctggtctcaaactcctgacctcaggtgatctgcccgccttggcctcccaatgttgggattacaggtgtgagccactgcgtccagcaggaagctagctttaaaaaatctcccttgcatctttattttcaaaaagctccccaagtggtttttatttatttatttttttgagatggagtctctgtcacccaggctagagtgcgtggcatgatctcggctcaccgcaacctctgcctcctgggttcaagcaattctcctgcctccgtctcccaagtagctgggattacaggcacgcgccactgcgcccggctaatttttgtgtttttagcagaggcagggtttcaccctgttggccaggatggtctcaaactcctgacctcaggtgatccacctgcctcgacctcccaaagtgctgggattacaggcttgagccattgagccaccgtgcctggcttcccaagtgctttggatgtgcagtcaagtttgggaaccaccgttttattgcattgatactctttttcagggtggggggggcattatctcctgtacatcaggccccatggaactttgaaaattggggttcacttttcttcccttttctttctttcttttttttttttttgagacagagtcttgctctgtcacctaggctggagtgcagtggtgtgatcttggctcactgcaacctccgcctcctgggttcaagcagttctcctgcctcagcctcccaagtaactgggactacagacatgcgccaccatgtccagccgatttttgtattttttgtagggatggggtttcaccatgttggccatgctggtctcaaactactgacctcaagtgatctgcctaccttggcctcccaaagtgttgggattacaggtgtgagccaccgtgcctgacccgcttttctttttttaatttttagagtgaaattatgcacattgaaattccttataaattggtagtccctctaatagaatcgttatgctatccaggatgtttgatttgctagaatagcccatttcctagtcatgacagataacaaagagcttttataacttttatgtaaattgctttacagtgaggcctcctctgctgtattatctatcaggagtcatgagggagggtttttggtgaaagtagcttcgtttatctcatgagtggacaaatgaatgataatgtggaaacaactagaggtctgaataggtagttgaatctagttatgatcatcagtgttggatggcagagatgcctgggaattctctgtatgtcaaattttagaataaagtcagtttgcctgttttatttctacacagctgaagcctttattgaaaataataggtgcgtaacaaatagttaataaaatttagtcagcagccgtttgatgagttcatgggaggaagaataattgctgaaatatagaaccatctgatttaaaacagattcaggcactagatacgttatccctaacgtagtttgtttgtatagacaaacctggttttgaattctgactcccccacttcctggctgtgctaccttaggcaaattacttaacctctgtgagcttcagttttttcatctgcaagatgaaaatacctggtaggattgttatgtggattaaaagggggaaaatatgcaagggaggattgaaagagagaaaaatatgttttttgtatattgtaagcaactcaataaacgtcccttctcccacttcctcacacaatttttattctgtaggcttaagatgcttttctaaatccagctttctctatatctctttccaggaatatctattcagtcagctcttttagaaaatgtatgaaagagtgaggactaaagttaagaaccagagaatatgggtaagaagaatgagtcacaggacaattagcaacactttaaacaattttttagaatgagtggagtgttggcatgtacccagagttactatctgcaggaataaatgaataacattacccaaattctgccatctgtatttggacggtagcccagattaggctaggagcctttgagggtggcctcattaagtagcacctgacatccatttctttcattatcttcttttctcccttttggtcttcgtttcttgttccctgtctcctccttttccctcttttaaagctgtccttcctttagacttgccaatcatcatcatagatgcaggcccagtccctggaactcgaggctaaaagaggtttctggttgctaacacctgtctcctagctaaatgaataagctcttttgtgggcaggatgttaaaaaagctgattagtacaataccagcttaaagggcctattaatgatacagcatatgtaaatcacagtgatttaaagccattttagagattaatttcttatatatttattttctatattgaattatgatgtcagttgaatttttacatctaaaccatgaatctgtttattacctaaacagactaatttctttcatattgattgggaatcatttatattctaaagaagtttccacccttaagggcctttgtattgtttggcaaatgtctaactagtgtgtaatacaattgaagttttgttcactgcgctgctgccataactagtttaatttctgctccttatatatttctgttggcagctggaaaattaaaatactagatgttccataaaactgattttttgaggggtgattttactgtcatttgaatggacttaggccccagggtacatttttttaagatgtcttattcaactttcctgtaatagtctctctctctttatataattaatgtattagacacataattggctgtttaagcattcagaagagacaatgtttggccttttacccagagattatttttttctacatctcttgaggaaatgtgtgccatttttggaaactcctaagtatattacagttacactagcacgtgaatttttgcaaagactagagaatgaacaattcccaaatcgttctattctttttagatcatagtgtttccaacctgatgtgaaaggagaaaggctgtgatgtgatacctagtaaatcctcctcataatttttctatatgtttcacagaaatatatagtcttcaataactgaagttactctcaaggagactttacatttaattactcaatccacacttaatttcctgcaagattcttggagagacactcaccaggctactgatttcatggagttataacctacacaggtttttatctctgttaaagctactaacccccactttttttttaggttgaaaagtgaccttggtctggtaatttcttcattgtcctctcctctaaaaagatacagcaaaaccttcttgctctctcagcagcgtttttcaactgctactaccgccatgtgctgaatttgaatttgagcacacttcagtgtatgattttgttgagctaatgttatctgactttttaaagctgccgctctgcaatgctacagttaaacctacattttctgttttcatgttcacatgccttttctagaattacatataaaaatatgttttcattatctctgagttgtggagtgttccctgggacagtcacttgtttctaccagtggctagttctaagagtaggggaaatccacctggatttgaactacttggcagccagtatgatctgctgaaacattttaactgtcttggtcctttttaaagaaatgctgcctactcatcttgaaacttacaggaagttaggccaagtggaggctctgctggcttctgagtggttaaatgcaacttattagtgatcaacaccattgtttatttgcaactgctggtggattatgttaaaagatttgaaaggaaaaaaagcttttcttaagtaaatcgtgcatcctcctctcccacctcaccctcttcttgttttactcttcatttgctttggaaaatctttccagtcttggtactgatcacatgtatatagtcttagtggcaattgaatcaacgtattttatcctaaaatatacaaaaaactatgtgccctaccctctgcattttctgctaatcctcccatgcttttttaccttcataatgattaaaatatgtgcctgagaaataaccaagcttcatcctctatcaacttccaaccctcttctaggtcttgcgtcagtagatgcataaccatttgcagttgggttggattgtaccatcttaactatactaattattattttacatggtgtggaagatcagccagagcatatgctttattctaaaatgctgggcaaaggaatgttctaatttggagagagaggaaggagtgttttctagggccttagcaggagtaggtccactgaaattcagctagtttgaggaatctggatttttgtcaaggggtggaaaggaatagttaggggctaaaattatgtgcaagcaggggtgggaaggaataatttatgagatgaggactttcccagtccacagtggagaattcttaatcttccagattctcttatgtttgtctacttatcatatactgatggaagagtttgtgtaatccttctgtgtcagagctaaagtataccttagccattgtttactgagagggtgggaagagggatgtcagaatattctcagcttgtcaaagggcattccaccttcctgttgtacccttggccatatggttgaatccagcacttcagatgattctgaatcatccccaccactcccattgatctagttcagtgtttcccaactctgaaatgttgacacagttagagaccagaagcttgaggaatagtgactgtgagcccaccaattaatgggggacattaaaatgatagtagttctgcagcttcacctctagatgatcttcatcagattcttaaattgcatttacttgataaaatcctcaccacagcacatcaacatgtctcttgcactacccaaaagcagtattaaaaaggaaaatacgttgacaattactatctaattaggtttttatttgagatacaggctatctatagctctgttgttatttgtggaaatgctagcaaaaaaacagactgaaatctttctccttatgttgttgttttagaaacaacacaaacaggttgggcggtggctcacgcctgtaatcccagcactttgggaggctgaggtgggtggatcacttgggttcaggagttcaagaccagcctggccaacagggtgaaaccctcgtctctactaaaaatacaaaaatttgccaggcatggtggtgcgtgcctgtaatcccaggaacacaaacataaaaataagcctctagttttatttgggagggatcgatataccatattcgagttctgaatatcgtgtcaggaaagcagtttttgatgccactagttaaatgtttgtgtgttttgatataccgttggtcttcccaaccaaacatcactttttttttttttttttgaaacagtgtctcactctgtcacccaggctggagttcagtggtgccatcttggctcactgcaacctctgcctcctgggttcacgtgattctcccatcttagcctcctgagtagctgggaccacaggcgtgtgccaccacatccagctaatttttgtattttttgtagagacggggtttcatcatgttggccaggctggtgtcgaactcctgacctaaagcgatctgtctgcctcggcctcccaaagtgttgggataagtgctgggattgcagatgtgagcctctgcacccagcctatccctttttaagatggggaaaaatggaaatttgctgttatgtattacacatattatgaaagcatattagaatgtattttctgggccgggcctggtggctcatgcctgtaattctggcactttgggaggccaaggcaggcagatcactggagcccaggagatcaagaccagcctgggcaacatagcaaaaccttgtctccaaaaaatacaaaaaattagctagatgtggtgttgtgcacctgcagtctcagctactcaggagtctgagttgggaggattgcttgagtccaggagtttgaggttataatgaactatggttgcacaactgtactctagtgtggacaacagagtgagaccctgtctccagaaaaaaaataataaaaatcaaataacttctttattggagattacatacaaatcgtgacctttttttttattcctgaagtctttagtaaggttatatgtttactgcaatagatcttaaattttactatgatcaaaaatctcctaggtgcttgtaaaaaataaagattcctggttcctagcccagccctacagaatcaaagtgtttgggatagagatgtgggattctgatgtagtttatctgtagaccccacttggagaaagaatttatgtgagaaagaaccacacataaaaaaaaagattgagaaatgctattattttgcagaggaggaatttaaagcacagaaaagtcaagaggctcagacttaactaggatatccagctagttatttgactcttgcagaccagaagctaggttggctgactactgtggatttgtgctctttccattagattatagtctggggtgtgccatcttttggcctccctgggccacattggaagaagaagaattgtcttgggccacacataaaatacactaacactaatgatagctgatgaaagtttatgaatttgtgttgggcccggaggccatgggttgatcaagcttggattatgccagggtgcctccttgctggtttatctgattgcctttaaatcagaagctataagataatgagggcaaaggtactttgattccttcagaacaataatgactgaactggcacttcatagtgtgaaaagtttgtgcttcttaaactatctgtggtgaaggaccagctttgtaagggtttcccttcacccctaatctgttgccagccaataattgtgtaaagtacaagaaaagggaatcaccagaaaaatcatgcacttggatgtcacagcaatgtcaagcactagaaaagtttctaaatgcttactgtgattttctgtgttttatcttgacgtgaatgggcctccagcagtctgacacacacactttgaatagcattgttctaagtggttcttaggacatcttaagaacttgatatcagaggtccttgatcattttcttcctcatgccacctataactgaagctaccatctgagagctcccattcctacctggggagagaagtttcatgacttggtggtttcctaggtcagaaccaaagttgataatacttagggactagttaaggaactatatagttaatttatttaattattataaataatttatatatatttaatatatatataatttattttaatatattttatttttatttttaaaaaccagaacatttattgtgttactaattgttgaaattcttaagatgaactggatgctgcagcagctgccctcttgggtttaggtggtgttctttcacagaatccatgcccgaatttgctgtatacaatttttaagtgcctcatttgaccagttccagtggtagtttgtcttttagccttggcactccagttatacttcctcttgcgcttggcagcatagccacatttgccacaggtcgacttctgaaggtggtacgtcctgtcacgtcttattgtgatgctttccaaacgatgatgttcccttcatcatctggcttctgttactattattattattattattattattattattattattattatttgagacggagttttgttcttgttgcccaggctggagtgcaatcgtgcgatcttggctcaccgcaacctccgcctcccgggttcaagcaattctcctgcctcagcctcccaagtagctgggattataggcatgcatcaccacacccggctaattttgtatttttagtagatggggtttctccatgttggtcaggctggtcttgaactcccgacctcaggtgatctgcccaccttggcttcccaaagtgctacaattataggcatgaatcaccacgcccggcgtttttactattatttttaaaattactgctccttgcagagcagggctaccctataggcaatgtgcccacagtagccaacctttaatatatttaagagtaaattgaggccgggcatggtggctcatgcctgtaatctcaacacttttggaggcctgaggcgggcggatcacttgaggtcaggaattcgagaccagcctggccaatatggtgaaactccatctctactaaaaatacaaaaattagccaggtgtggtggcacgcgcctgtagtcccagctattcgagaggctgaggcaggagaatcccttgaacatgggaggtggagattgcagtgagccaagatcatgccactgccctccagcctgggagacagagcaagactccgtctcaaaaaaaaaaaaaaaaaaaaaaaaagaataaattgatagaatttgcattgggtgcttgtattgggaggcatattcccctctttttgactaaatactggaaaggagtttctaacttcttggcctgtaacttaactcacagttaagatgcttaaagatgggagacagaaaataaaatttaggggtgtgcaatttcttcgagacgcttttgtgtttgctttttagaagccttttgtgaatagtctacgaggatgcattattagtttttgtggttataatgtcaaaattagtgttgatttggagcaggcagggaaatctctccatgcatgcttttcatcctggtttaattgcttagttggatgaaatgtcaaacttgatagattattggagctgttattttggtagttaaacaataatgaaactgtttgaatgtttttggagaacactgcttcctgtgtctggactttgcactggagaaagtttcaattgttcacaagcaatactggttagaaaatgcagcttctgtggctcctaacacagctgtctaaattactagctatatgggggcctttggacaagcactgcttaacacttttggaaacaatttgtttctgattccaaaaatgtcgatggtcattccctgaatacttgagaaaactagaaatgggaaaaaggtattgcatgtgtctaggttatgccagtcaagtgttttttctttaagcatctctagaacaaatttacctttttagctaaggataagaggtttatggaaatgttgtagcagccccctgggcctttctttcctccttgatgactgttcagcagggtagcatgttgtcagcttgtgtgccagcttacagagggcttgcgttattataaccttgattaggaaagagggatggggaacaggagtgagaggacagatgtttttgaaagtccctctgcctgctatgtgaaatcttgaattttcactttgaacttcactgttgtttggtgacagatgttataaaactgtctttacaaacaatcccctttcctattgaaattgtatgttggccacaggagctagggaagcattgggcatgttcagcaggatttatttcactcattccactgtgtcagatgatactttttctgaatgaaattgtatgcattcttcagtgggagttaggggaaggcttattcttgtctaaaagtatgggagaatttgtgtaagactgatcaaaagactagcacttcttttgctatgtgatacttctctttgtgccatattttacctgtaggaaaattaccaacagttattatgtgctctccaggtgccagggactttgctgtattaacaagtttaatcctcctaacaatcctatgaggtgtgtaggtgttatctgtgttccacaaatgtgaaaatgccgcacagagaaattaaagagggggcccaaagcctcacagtgttggaacccaagtattccagctgtcaaggttgagctgtcaactactgggtgacagctgcctcacactccgtcaggatgattaccttttgaataagtctttacaaatatgtcggctgcagaagtaaccagtccagaatgaatgaactctcaccgcagttttagctcagcaagcagtgcctgctatcagaaacatccaaaaaccacagcaattagacaaataaattgtgaaagatgtggtttccaggtaagatatgtgacaggcttcttaccgcaaatagtttttcttacaaaaggagaaagactggtgggagagatggtggaaaaaatgaaaacaatgtgtcttttatgattgtctgggcccatcctcacaggacttcatatgtagtgaaggcagaatatttacctcaagcccagatgaccaacttttactttctacactgactcaggcttcttcctaaaaatggtgtttcaccatttattccactaacatcactttttaattcttaaaataaaaaagaatagttttattcataaaactacatgggcctacttgtgtggaatgtgatttaaaaatgatgttagcaatacttgttacttattttactagttttagctttgttagtgctgaaggatgttttatagtttattctaaaattgtaaacgtttttgatgtgtaagccagtcacccttaaaagcacatttggctaaataaataaagcattaggttagagaagagttcactggtggttattttttgttttgtgtgtgtgtgtgtgtgtgtgcgtgtgtgtctgtgtgtggggtcttcctgtttgtcaataggccttcccaattaattgaattctacataagatacatagatgttagtgccccatagggcctcatcttgtaagtgatgttagtggagtaaatggtgatataccattttcagtaagaagcctgagtcagtgtagaaagtaaaagttggtcatctgggcttgaggcaaatattctgccttcactacatatgaagtcctgtgaggatgggccagagaatcatagaagaaacattgttttcattttttccaccatctctcccaccagtctttcttcttttataagaaaaactatttgcggtaagaagcctgtcacatcttacctggaaaccacatctttcacaacttatttgtctaattgctgtggtttttggatgtttctgatagcaggcactgtctgctgagctaaaattgcagtgagagttcattcattctggactagttacttctgcagccttctggcccattactcatggctttggtgaggctcgataaaaatattgtgatggatagggcacaggtagtgcctgaatgtatttcagatagttgggccaacaaccaatctatgcttaaataatcatctctcctgcatagtagagactgcaaaatagtatgaaacatgctatactttataaacattttgccttttttagctccccgtagtggctggacagttgactgaataatttcatgttttttttttttgagacggagtttcactcttgttgcccaagctggagtgaaatggcacaatctcagctcactgcaacctctgcctcctgggttcaagtgattctcctgcctcagcctcttgagtagctgagattacagatgcacgctaccatgcctggctaattttgtattttgagtagagacggagtttctccatgttggtcaggctggtctcgaactctccacctcaggtgatccacctgcctcggcctcccaaagtgctgggattacaggcgtgagccaccacgcccgaccacttttttttttttatactttatttttaggtaattatagattcacaggaagttgcaaaaacactacacagttcccatgtacccgtcacccgtttttctcccattggttatgtctcatttaaccatagtacaatatcaacaccaggaaactgacatggtgctctgtgtgtgtgtgcatgtgtgtgtgtgtgtgtgtagttttctgctgttttatcacatgtatggatttgtgtaactgttctaccaccacaaagatcccccttgtgctactcctttattatcatgcatatccgttttccctactgtcctaatctctggaaaccagtaatctgttcggtgtctctataattttgtcatttcagaaatattatggaaatggaatcataacagtatgtgacccaatatgtgaccttttaagactgggttttttgttttttacttttatatgcatagaacaattggaactttttttttttttttttgagacagtgtctggctctgttgcccaggctggagtgcagtggcgcaatctcagcttactgcaacctctgcctctctagctcaagccatcctcccacttcagcctcctgagtaactgagactacaggtgtgcaccaccacacccagctaatttttgtattttttttatagacagggtttcaccatgttgcccaggctggtcttgaactcctgagctcaagcgatttgtccgcctcagcctcccaaaatgctggtattacaggtgtgagccactacacccagcctcgaatgtattttttgtagagataggtctcactgtgtttcccaggctggtcttgaacccggcatttttcacttagtgtcacaccatccatccaagttattgtgtggcagcaatagtttgttccttttatctctgagtagtattccatggtgtgtatataccacaggctgtttaactattcaccggaagggcattttagttgttaccagtttggggctattacagatgaagccataatgaacatttgtgtacaggtgattgtatggacacaagttttagtttctttgggttaagcatccaggaatgaaattgctggttcttaaggtaagtaagtgtatgttcagttttccaaagaaattgctaaactttttttttttttggacagtgtctcactcactctatcacccaggctggagtgcaatggtgcgatctcagctcactgcaacctctgcctcctgggttcaagcaagtctcctgcctcagcctcccaagtagctgggactacaggtgtgcaccaccactaccagacaaattttgtatttttagtagagacagggtttcaccatgttggccaggctggtcttgaactcctgacctcaagtgatctgcccacgatgtcctcccaaagtgctggcatgacaggggtgagccaccgcaccgggccaaaattgctaaattcttttccagagttgctgtaccattttacagtctcaccagcagtgtatgagatccagtttctctgcatcctcaccagcatttgatattgtcatcatttttaaatttttgttttttttttttttttgagttggagtcttgctctgtagcctaggctggagtgcagtggcataatcttggctcactgcagcctctgcctcccaggttcaagcaattctcctgcctcaccctctcaagtagctgggactacaggcatgtgccaccatgcctggctaattttttgtatttttagtagagactgggtttcgccctgttggccaggctggtctcgaactcctggcctcaagcaatttacctgccgtggcctcccaaagtgctgcaaatacaggcatgggccaccgtgcctggccaccattttaaattttagctattctaataggtgttatatctggtttttaagttcatcagattacttagtaaaactgattcgactgacaaagatagaagatttttgagttgtatttttagctctctgaatgaatctgcctccatacagtgtcacagtggtctgctgactggctttttagcacccctgccatggtttccttgacagcaagaccctagacaaactctttttacccagcaatagatagcacagcactcccagtacagtactgcccatagacaaataatacaatttcaaaactgtgaatttcttgttaattttttatacttttgcctccatgactgtagctttaaatgtactcaaaatttggcttccaaaggccctaaaaactttttcaaattgttttggtttatgttatcaaatggtcttaggtactttatttctaatacgattaacttaaactgctcacacctataatctcagcactttgggaggttgaggcaggcggattgcttgagcctaggtgtttgagatcagtctgggaaccatattgagaccccatctctacaaataataaaagaattagccaggcatggtggcatgcaccagtgatctcagctactcgtgaggctgaggtgggagattgcttgagccagggtggtcaaggctgcagtgagctgtgatcacaccaccgcactccagcctcggtgacagagtgagaactgtctcagaaaaacaaaacaaaacccagctaaaatagcataaagtagaagttagacccccatccctactaggaataactgctattaaatggttttagtatatgtgtgcgtgctcgctcgctcttttgcacgtgcgcgtgctctccctctctcggtgtgtatgtatatatatgtatgtgtgtatctatcatatataattaaatatatattcccccctgctgttcacagtgctttttttcaaatgggtaatgtattatggagcattttttaatgtgaattttttaaagcatttaggacctgggatggagctttgggttcctttctccaacccttgtctgttctgttataaaagggatgagagaggtacctttgaaagacctaaagaaaatacgttttcttccttgttacatgggtttcagttgaaataaggttttagctttatttgtgagtaaatcagtagaatactggatgttaggatgcatctctccactttattataaataatgcaaggctgattttatgatgtgatctcttgcagaactttgggggaagtgagaactgtgagcacaataatcttcagagaatgcacagtcctttgggtatttgtctactcatcagctgcttagtcagatggagtgttttcctaagtactactgaagtacacagttcagtctttattttgaaatctctccttctgccttctctccctcttccattactttgattaccttgatgggacattcaagctgtgcagtcgtatccttttatttctatagcctgcagaaaccaggttgaagattaactgtaggtgaacaggtaatcttatctacttggctagaaatcacccttcaagatgaaacacgtgttgacaaaggccccctagacttggggacatgaacaaaggtaagttaatcttggggcattattagtggaaaccagggtagacgtttaggaagtttgacttattggaggcagggcatgtgtgtcagggagacagagcatgtgagtgtgtgtattaggagaagagacgaattcagaggtatacagaaaagaagaatgatgaattcaggcaatcttcagagttgaattacagaatcttttttctgagagtatggttactgcggcaaggtagtaataggacatgagcctgctaagtcacttcattatgaagctattagaatttaggtgatggagtttgatgacaggggtcttttccctgcccttctactgtattagctgctcagggaaaaaaaacagaaaactaagaaatagccttatatagaaaattatacccatcaaatggttccaaggtttctgttgctgggtttctgaaatgagctgcccaagatagcagtttggtcatgttgctgacttcttgctgacttcctttctcctcctcctcctccatcgggtcctcaggctgggtcctgacccctctggattctttcttttcctgcatgcttgctactttttcaattactgacatacaggaacctagtatttcattgtgcctgaggtaggcagttgctagcctcttgatattggataccttttctgagctatgaagtattacaccatagtggataataaagtactcacaattgcattatagaatagattctggtaactgcaccagtggggacagactgggttagcatgccctcacacaactggggggttgttttgcagcaaagtgctgtgaagcaggttgagcctcatgcagtgccagttcctgtatctaaatgtgaaagtggcttgttaaagattaaagggactgcctggtccttctggccccaagatggaatgatctctgccatggcgacagcctctatctcccaggagaggccattttatacagcacatttgtgcttccaaatgttactgtaagcctgcactggctgatactctggcgataagttgacatttgggcactctcaagacatatgagctatatagcatcccatggtttgaatttctgggcaaaattggctcatcaggaagtcaaaagcctctactttcaacctgttcctttgggttttctcctttgttttatttgactattctgttgagtcaaatgaactttaatttttagccataaaaattccattaagccccttgtatcatatccaggtgtgaaaatgtctcagtataacaagactgtgggtgacaggtgaaatccttaatggtagttaggataattgtctctgaaggcttgaagaaaataatggtccaaccaacaaagtgaatacagtttgtattttttgtggttcttgtgggtgagcggacttatgtttaggacctgctcagtgtgactactgttcagcttggaggtctttgaaaaaactttttttcattttactctaaacagtgcttagggaacatagctgtgtcctttttctcaaaacatgatccaaggcccatctgtatcagaattgcttggaaggccgggcgcagtggctcacacctataatcccagcactttgggaggctgagacgggcggatcacttgaggccaggagttcaagaccagcctggccaacatggcgaaactccgtctctactaaaaatacaaaaattagccaggcctggtggtgcatagtaatcccacctacttgagaggctgaggcaggagaatcgcttgaacccggaggtggaggttgcagtgagccgagaaattgtgccactgcactccaacctgggcgacagagcgagactctgtctcaaaaaaaaaaaaaaaaaaggcttggaagagagagatacttattaaaaattcagttttggccaggcatggtgactcacgtctgtaattctagcactttgggaggctgaggcaggtggatcacctgaggtcaggagttcgagaccagcctggccaacatggcaaaactctgtctctacttaaaatacaaaaattagccagacatggtggcatacgcctataatcctagctacttgggaggctgaggaaggagaattgcttgaacccaggaggtggaggttgcagtgagctgagattgcaccattgcactccagcctgtgcgatgagagtgagattccgtctcaaaaaaaaaaaaaaaaaattcagtttctggggcctccctccatgtctgctaattcagagtgtctgagggactgggatgagaaatgttcattttcaataagcacccctgttgattcttaagtacccctagagttaattgttgagtatcataaagtttacttcatttttcatgtttaatttctgtgatttattagatgataaatatttggttgccatcatattgtttttcttaaatactatgttctatagttaaaaaaaaaaaaaggctgtgaggtcactgaacaccaagattagaatttggcaatcattaattatcaacaaggtgagacaggcactgattcctggaaatgtgcatttatccattcaccgacttctcagttagaaaaaggatgtggacacaagtaagattaattttgttaaaaacaagaaatgtgcagtatcatttaggatgctgggggtagggaagtagataaaagggagatgttgagaggaaagagtgtgaagagagagtaaagcagtttgtaagtgatacaaactttaaaattttaactgaattttaaactaccaagtcatatttgaatatatgcttgttgtaaaaaaattcatgatttttggggggtaatttggataaagctaaacatagctatttgatctttattcccattacagtgctctccctgctgtgtgcatcctcccagatcttctgtatgtatttggtaattttctgtggatttggaagactacagaatcctgagaaatggatattttaatttctcttttgaaacctgcttattgtttataatgtcaagatctattgcagaaaagaaagtaaatctgggatgtcaatgacatcacatatgtctgttcaaatgaaacaatgggcacatacacatatgcacactcattaaatatctgttgagaccaccctattaaaaaaagcataaatagttttgggtgttaagttacttgagttttaaaataacgtattttctgtttttgttgttttttgttttgagatggagtctccttctgtcgcctgggctggattgcagtggcgcaatctcggctctgcaacctctgtctcctgggttcaagtgattctcctgccccagcctctagagtagctggggttagaggtgtatgccaccatgcctggctaattttaaaataatgtattgaaagaacttagtcagaaagccacagttattatttctcccatagcctcatattctcataattttcatgtaacctcataaatcctcaagtgcctgaaaccactagttcaaacgagtacctttttaagctctaaaatgtaatcctcaacctttccactttaaaaggaagaactaggatggagtgtggctataatttggggcagttggttaaaactgtatcagagtcccaaagaggggaatgataagctgcagcagctctgttcacttgctcaatggtgtttctcttagtcaacttaggagttccatgcctttggccttcaggctgctctttatatagttcgtatctgtctcctgggcatagtactgtctggattttctctttctttttttttttttttttttgagacgaagttttgctctgttgttgcccaggctggagtgcaatggcacaatcttggctgactgcaacctctgcctcccgggttcaagcgattctcctgcctcagcctcccgagtagctgggattacaggcatgtgccaccacacctggctaattttgtatttttagtagagatgggggtttctccatgttggttaggctagtcttgaactcccgacctcaggtgatccgcccacctcggccttccaaagtgctgcaattataggcgtgaaccgctgtgcccggccctcttatttaaagttcgcaaatacagaacaggtcaggagcttttctaatcattttttttttttctgaaggaggttccatatttgtctgtaccttgagagttgtttcatactagaatttgtaacttatcatcaactacagaaattttttttaaagtgtggttgaagagataatggttgtcagctgctataaagatgtgtttatcattcagaaaggactaattaacatgtactatagggaaacttctttaaacaaagccattttctgaaaggaaaacactgaaggggaggaaataaaacagggaacattttataataccttatcaaagctcagcgtggctatcctactggaataatgtaattaaggagaattaagtgagttggataaataactttttaaaactagccccttgaatagaaaattaagtagtatagtttttaaactcaaattctgtctgcacgtacattttaattaacctaacattattgaatgacaagctgagttggcagctacatccagagttcatgccatgtgagacctaccttaaaggatgaacgaagctgggtgcagaggcctcaaatgccctgctaagaaatagctgatggccttggggaactgtcatacattttaagcaggaaacagaaggatctaataggaactttagtttctctcttgtcaaattaaagcacacaaaaagcaaggacttgatcttttttttttttttttgtataacaccaatgtcaattctagcctgtcagggcaaattcagtaattaatagctgttgatgagccagtcattctagattgattttttaaataagcaggctaataaatgagaattgacataaatttagggatgtctcttttcagagcaagtgttaaggtgattttcatagtcttctgtattccctatgcatccagtaggtgtgatggtaaatgatttggctttagcatagagaatgtggcagctgattaaaaaaaaaaaattccagtgcatctatcttaatgagagaacttgagttgtctgaagaaatagagaggtcagaggaggcctagtgggaaaaaagaacaatgagcctggttagaactgacaaaaattcaccctaatgatttgactggctaatgatgactgggcaagttccctgagtccactgacccagatgttctaatttgtaaatgcaaagtgacttatttatcagcctcctggggaaatcttcagagctgtgaacctgctatgttcagtaatcttgctggccccagccccagcctgttctcagatgaaattttagaaactggccactggaactttttgggtaagggctctggaggtggccaagttaccagtagtgggggaatgaggtttacctgcccccagtaatcagcacttgatttaaaacaatcagtgagctgcctcttctttcctaggttgcagttgactgcggttggttcaggctgagttgtttgggaagtacaaattttgcccagcgtgagtcagcactgccctgggtaaactccctgctgtgttgcaatcttgcttaccaaagatacatccccaggcggcaccattcacttcacatgaaagccgctgctcttggttcctgagatgatctcatctgaacatggctccagcgacctcagccacaggaactagagacagcttgctttctgtcgtggcaatgttttgaaactggcaaaatcaggtaacctcaaactgttttcttaagtttcattagctagatgaagctgcattagaaactgggaaaatcctgtcttcagaagtgagtcaggttttttttttttttttttttttttttttttttgagacggagtttcactcttgttgcccaagctggagtgcaatggtgtgatctcggctcactgcaaccttcacctcccgggttcaagtgattctcctgcctcagcctcccaagtagctgggattatagatgtgcgccaccatgcccggctaattttgtatttttagtagagacagggttttgctgtgttggtcagtctggtttcgaactcccaagctcaggtgatccaccctcctcagcctcccaaagtgctggaattataggcatgagccacggcccccggccagaagttttctttcatttgagttctggatgtggagttaggtccaattaaatcactgattatataaatcttagaaaagtaaaacgttaggtttacagctttatccgtcatttgctcttgtattttgtttttttgtgtgtatcttgtgagaaacactttagtcaaactaagccattgttaaaggaaaagaagtgaaggcatttggttgccttcctaataactaaatattgagttgtggagaacactgtcttatcagtgagtttgttcccatattcctttctgaattaataggaagaacctccctcatctctaattctactaggctactactctatctccctcctgcttttcatcgccaaacttttgagtccttcacctaatcagactatgatatctctaggtagtcgtcaccctccaaattacgtttctgctccttataattccaacaaattgcccacgttctctttcacctcagaccttagcatatgtaagcgttcttttacacaccttccccaagcttaatctggccaactggtttcagcctagaagtcacctcttccatgaagcctcttcttacttaccagggttgagtactcaggagaacctggtatttactccaatcatagtatgtattgagaatcagggtctgctttgctagaattgtatccatggtacgttgcacatagtaggttctcagtaagggtagaatgagcaagagcctgtactgtactttctcaactctgatcctctcatcaactcttttttttttcttctgagaggaatcttgctctgtcacccaggctgcagtgcagtggtgtgatcttagctcactgcaacctctgccttcctggttcaagcgattctcctgccttagcctcctgagttgctgggactacaggtacgtgccaccacgcccagctaatttttgtatttttagtagagacagtgtttcaccatgttggcgaggatggtctcgatctcttgacctcatggtccacctgccttggcctcccaaagtgctgggtttacaggtgtgagccaccgcgcccggccttgttcattctttttatgctcacatctttaaatgtgctaaaccctgttgattttgttggagtactgtttgatgtgtggcttttcttcattcccactgtcattgccttaatttaccagaggtcaaaactggacgtttaaagtcaggctgggcacggtggctcacgcctgtaatcccagcactttgggaggccgaggtgggcagatcacctgaggtcaggagtttgagaccagcctggctaacatggtgaaaccccatctctactaaaaacaaaaaattagctgggcgtggtggcacgtgcctataatcccagttactcaggatgctgaagcaggagaatcacttgaacccaggaggtggaggttgcagtgagcgaggatcacaccactgcactccagcctgagcaacagtgagactccatatcaaaaaaaaaaaagagtttgagaccatcctggccaacatggtgaaaccctgtctgtatttaaaaaaaaaaaaaaaggcacgccacgcatggtggccagtgcctgtggtaccagctacccagcaggctgagaaaagagaattgcttgcacccaggaggtggaggtttcaatgagctgagattgtgccactgaactccagcctaggcacagaagaagactccatcccaaaaatcaatcagtcagcctaagggcttaaaattttgtgtgtgaatacttttaggcaccatcagagagaaggcctgtactcttcaaagattacggataccaccattttctgacatcttacacactgaagacttagcattttacctgcattgcctctaggaatttgagtttgtaactcctagttcagacccttatcaaatggccactcctccataagtctttccttgctcctatcttctccatattgttgcccaagttatctttttaaagtccacatctaatcttttcatttaaggtgccatttgttccctgttttccacttagcttgacttctaaaagctttcacagttggattctttcctacatgttgctgttaaccatctcatctccctctcccctggccatttctctcctctccagcttcactgaacttctcatgttaacattccatggatataccatgtcttttaggactctgccttttcccaatggactctcccttctctaactggcaagatactcatccctcaggacacttagttcatatatgcatcttctctgacttctctgtcttttctgacagacagcactgtctgtctcttccactagactgttgagttctttgactgaacttggtgtccctggactagagcttggcaccatcagagagagtggctgacgtggatctccgggctcaaaccgttattctttgcaatattagaagcttttttgttagatggcatggtttttcattcctatttgatgaacatgagcccatggctgcttattttgtatgtgttacctgccaccatcaagtaatcattcaaagttaatttgaagatttaaagggtttgctgagatctagtcccgcaatatcacgacatttttatggtgttttacaaaattatttccctcatatggttttatttgcgttgggtaggctttatttattatccctattttaccagtgattataaagctagtctgataccaaagcatatatacatttaggtaagactcagagagaaaacatggttcttacactgcattaagcagctggtttgtctcttaatatagtagttaaatatactctatcaggttccacagaaatggtgcctttgctcgataggcaagtgctaacggtcttgccttttacaaggccactttatcatcaaggtaggaggaggaggtactctgaacctgcctgacctatgggaaggccctggttgtggttagagaccttgattgaaattaatggtgtgcgtactccaacctctcaggtttttcttttatacttcaaatatctggaagttgtgaaaacctgctgccctggtggagtatcaaaccaggctggtgagtgaaagcggtcatcccaaaatggagtaagctgagtgttaagggcagaaaaccttttacagttatagtaagtaattaactttttagatcacttcacaacttttggagtgctaaaatgccatatttgggactatgagaaattccattataaaaagctgaaccattagagctaggaaataatctctgttagatattggcatatggtgttcaattttgggtctctcatacttgagaggataattaaaatgattaaaaggttgaaaaacaggtcttatcattataagttttaaaaaggggggaaagattttagcctagagaaagaaaagctaagagataacttcattatcatcttcaaatacaagaatagttttgccagggggatttttattaattattcttcatgaacttcaaagatttaagaggaaatggtcttaaattgaaggaggagcaattttgatgaatacgagaaagaattttttgatcatcaaagtggggaaatgtttgaatgactgcccaagagagtgttgaatttctgactgtttcagttgtctattgtgtgacaaattacccgaagacttttggtggcataacatgacaaccattttattgcctatgattttgtgggttagtaattcaggaaaggaggacatatttttttttgtcccatatgatgctgattgagctggaggatccaagaaggctgcacatgtctgtacctttggagctagctgttggctgggatatcttggttctctgtgagttctctttcttggtctctcatcacttataaacctatatcgagtggccgagcgcagtggctcatgcctgtaatctcagcactttgggaggccgaggtgagtggatcacctgaggtcgggagttccagaccagcctgaccaacatggtgaaaccccgtctctactaaaaatacaaaaattagctgggtatggtggtgggcacctgtaatcccacctacttgggaggccgaggcaggagaattgcttgaacatgggaggcggaggttgcagtgagccaagattgtgccattgcactccaacctgggtgacagagcgagaccgtctcaaaaaaaaaaaaaaaaaaaaattctagctcgagcttcttttacatggtggctgggccataatggaagctgcaggatctcataagacctaggcctggcagtcatacatcatcacttttgccccattctttttgtcagagtaagtcacaattatagcccagatacaagaggaggggacattgacttcacctctaaaggatagagggtaaaaatcacattgcaaaagggcatgcaatgtgattgggattattactaccaactttattttttgaaacagagtctcgctctgtcacccaggctggagtgcagtggcgcaatctcggctcactgcaacctttgcctcccgggttcaagtgattctcttgcctcagcctcctgagtagctgggattacagttgcttgccaccacgcctggctaatttttgtatttttagtagatacggggtttcaccatgttggtcaggctggtcttgaactcctgaccttatgatctgcccgccttggcctcccaaagtgctgggattacaggcgtgagccaccgcacctggcctaccaccaattttagatacaatttaccacactgaccttagagatttttcatgaaagaataatcaatatatgtttattaaatgggtagtttgggcatatgatttacaaatttggctgcatatagagtcatctgggagctttttacaagcataagctcctaggtaccagaccagtgactcagtgtctcctgggggtgttgtgttggcacataagagacactctatgtcctttctttcaggtaactatcagtaaaatgagtatggtggggggggatagatagatataatatgtaaggcaagatgatatgtacattgagatagatctcatctctcctgcttctaggacttgattgaatcctatctagcatgctcttctttccagtctgcctagtgtaaattatatttcattaaatcagcccatcatcagaacagtgtttcttgatgcctctcatttttttctcatgttttctggcatttttccttcattactttttttttagttcataattcaatatttatatgattgtttgatgtataatagacaaaaatacatctgctttgctttcgagtatctaacatagtgtctgcctcataaaaggcactcagtaagtacttgttgaatgaataagtggttgattgaatgcatgattgaatgaagtgatatttgaatttagctttaaaggtgattggaattttggacaggtagagcaaatgaatgggaaatttattgttctgaagtggaaactggatcatattgctcatgtaatttcagaaaactggagaaactggtttgggaaaatggaagagttggttttatatctagtatgctaagtttgaggtatggaaatttagcaggcatttagaaatgaagcactgatctgaagggtgagattgattccagatattcacttttgggagttacctgactggagaatgtgaaatctgttcctttcacaaatacctggtaagctcctactgtgtgccagacagctatgttatagggaaggtgaactgcagtctgagaaggagccagtcttgtgaaaagagctagggagaatgtttcagccagaaaaggaacccaagtttgtaggccctggggcaataaataatttataatttttgaggaattgaaggaaggtgaccgaaggacagagcaaggtgagtgaagtgggagagctgcatgaggtaaagtggaaaaggcaagcagagcccacatcacatggggactttgtgggctagatagtgagtctagccttcactcaaaagtgtggtggggctgggcatggtggctcacacctgtaatcctagcactttgggaggctgaggcaggtggatcacctgaggtcaggagtttgagaccagcctggtcaacgtggtgaaaccccatctctactaaaaatataaaaaattttagccaggcatggtggcttatgcctgtaatccgtgctactcgggaggctgaggcaggagaattgttggaacccgggaggtggatgttgcagtgagccgaggttgcaccactgtactccagcctgggtaacaaaagtgaaaactctgtctcaaaaaaaaagaaaaagaaaaaaaaaaagggtggtgggacaccattgaaggcttaaaacagaaagtgacaagcaaagattctttttctaaataaaaggttaccctggctactctgtagagaatagagagtcacaaagaagggaccagtaaggaagtgtttgtctcccttcttgagaaggatcatcgcagatagggcaggatatggcagtggacatagaacgggatagttgcaggatgcatttaaaaagtagaaccaggctgggcatggtggctcacgcctgtaatcccagcactttgggaggctgaagtgggcagatcacctgaggtcaggagtttgagaccagcctgaccaacatggagaaatcccgtctctactaaaaatacaaaattagccgggcgtggtggtgcatgcctgtaatcccagctactcagaaggctgaggcaggagaatcatttgaacccaggaggcggaggttgtggtgagccgagatcatgccactgcattccagcctgggcaacagagcaaaactttgtctcaaaaaaaaaaaaaaaaaaaagtagaagtaaaattcactagagaaggaaaggaagaaggaagagtatggagtacagaaccctagggcctatgtagggggcaaaagaaggaaccagggaaggaaaataagggagcaagagtggtcattgatgtcaaaggtaagtcaggctaccacgcttgcagtgggagccagtgtgggagaaggagtctgtaaggggaattcaagtgtatccagagtaagtgtgctgtctgatgtgtggcaagtcaatacccaagacctgggggcggggtttatttgttgggctgcagaatgaggagatgagagggaactgcaaatccgtcctcctgaggagtttggagctagggtttttaaggattttggagtgggctggaatgtggagattgttgggtggtcagagagagaaaggtgaagtaatgggacccggagatgaaaaaactgtattatgctgattttatttctctctgagggtcttcaaactggttggcatcagctgttttaccagaatttgggatctgaaaaatatctcaagcaattcttaaaaaaaaagccttatgcttctaatgtcagagatactatctttagaaacaatagggatgcaaatggtcagtatctagcgctgtgtgactttcagttacaaggaaatgtgtcaaaatccagcctgattaatgttttttttttgtttgtttgtttgtttgtttttttttgagatggagttttgctcttgtggcccaggctggagtgcaatggcatgatctcggctcactgcaacctctgcctcctgggttcaagtgattctcctgcctcagcctcctgagtagctagactacaggtgtgtgccaccacacctggctaattttgtatttttagtagagatgggttttcaccgttttggccaggctggtctcaaactcctgacctcaggtgatccgcccaccttggcctcccaaagtgctgggattacaggtgagccatcgcacctggcctaatgcttaattaaagttatatttctgtccatagttcttggtaaccctctgaagacagcttcataatgaagaatttgggtaggttttgggtgcatggggcttcagggagtcatgaaggttgaggacataggaaagaatcacacatttatccatcagaagatcattggtgaccattggccgggcgctgtggctcacgcctgtaatcccagcactttgggaggccgaggcaagtggatcacgaggtcaggagatcgagaccatcttggctaacacggtgaaaccccgtgtctactaaaaatacaaaaaaattggccaggcgtgctggtgggcacccgtagtcccagctactcaggaggctgaggcaggagaatggcgtgaacccgggaggtggagcttgcagtgagccaaaatcgcgccactgcactccagcctgggcaacaaagcaagactcaatctcaaaaaaaaaaaaaaagctgttggatcggtgtttactaagcacctactctaagcctgtcactgtgttagtgttaaggatttgtgtgaatgacctcttttaggtacttcattttacagatgagaaaaatgacgcttagggaattaatcaccttaacaggtcacacagaaagaagactatgagttctgtctgacccaggccccatgctcctaaaccttgcatgacactgctctttggaaagccctatcaggacatcagctagagaggaatgaaaggtttttagagcccagtgatggcttaccccagctgtatgaatttgttagcaacccagttaaataaagtcttctgatttttctatagtaatctggcagtttaggaatggagaggtgggggagggaggggaagataaaagatagagtaagagttcagtaaattagaaaggggattattttgttgttcataagtgtaatgattggattttcatgcacatgtatgagatgtgcctccatcaagccttgttactacaaagtcagtgcattacccatctgatgtgggaaaaataaatcagaaagaggcctcagcttgtgggaatggtggaatgcaatggcttgtgttgttaagcaaaattgtgttttacagtaaatatttattgtggttcttttgatgcaagttatattgggatatggaggaaaatgcaaaaatggataagatggtgtatttgacctctacacggttagagaggaaggtaaagtgcttcactatagtgcttgattgaagggtatgacaggggtggaaggtggagaagtatgggaaagtattatacaagttagcttgtagagcgagggtggcattaggtagggctggccagggtggtgccaatctagcttctcaggatgacccctcaggattttggtcactgtgtcgtcagtctagtcttgggtcacaaaatgtattttgtggagaacctggaaataattagtcttgaagacaggattgtattcagacttgagtgattgagctcagaatggaatgccaatttattattttagaatgaaggattccttttccgttaacgggattctggaatttgttaggataattgcttttcaatatcaagagatctggcaatcaaatttaataatatcaagcttgcttggtgagcatggatttataagatagaatggtttgtgggggagaatatagttacaaaaaagattattgtttcccataatgcctggtattgtattaagtactttgcatacagtagggcatttcattgtcccagtgatcctcctgcaaagtaggtacaattatcttcaatttacaaatgaggaaaccaagctctcttcaagctgataagatgctgaactgagatttgaaccaagtccctctgcccctaagagcccctacccctagctgctactatatgctgtacccatctaagctttgtgaaataaccttgttccactgcagagaagatgttgtgtcacctatctctagtatttcttggctttgggcagttctggagtcaaaatgcccctccctgttttttctagatttttccagatttctttgttaaccagtcttagatgtggtcacattctttgtttaaatacccgtgtattaatatagtcatccaagcctttttgtcctcttcttgcttttggtttggaagatactctgtctctttggaggaactttacatatctgtgcacattgattttgtgttgattttattatcttaattttatgggttaagtttttgagtttcttccagctcctagtccatcaactccttcctgtccccttcctcttccactagacttaaattcagatactaatgccaatttctgaatactcagtctggctccagtccacctatccaatttagacatggctctctggatcactagctattgccagttactcactgctcctgtatgatcttgatttcctacttgagtacccttgtttctgttgtgcttttggcttggaatgtcattcttcccatgaaggctccctagtctgatccctcactgggagtaatcacttcttcctgagtctcatagcagagaattctcttttatgtctcctttgtggcacattacactttctgccatctattatagttgtttgtgtacctacctatctcctactagaccatggcctcactgagcagatctgtctggttgacctttgtctttctcctagtatctagttcagttccctgcacatagtgggcattcaatatctattggatgaatgaatgaataactgaacagaatttcaggtttttaagtttctactcattgtttattatagattccctcccttttttgcttttcttcttcctttcacatttccttttctttcttttctattaacctgtgttttcccttgcactgactcactgaacttctctttaccacccccttttttttacccagattttgcctcattctctcctcattagcagtcactatgtgggtgtgccacatgctgctggtcagattttctccatccttttgtggcttgagttcccccatgaatcagatgagcagcataggaattgactggtgattacattaacatcttaataaaagaccatgtataaagaacagtacttaaaatttgtcagtatattgctttcaagagggaaattttccaatgcatgtttcaagtgaaagggaaagggaaaaaaaatcttccggtactggggaggtagatcagggcattttattcacagtgtgggatgtgggatgtcaaaggcatcttatttgaccaaagaaataatgcaggaaaccacagaaacttctgctaaccgttaatattgaatcctcaaatttttctacagctggagaaaacattagagatgaatgtagttcaaccttcctgttttccagatgagaaaacagacccaaagaggctaaatgacttgtccattaagctggggtatttgttgcccagtgtttacttctagaactgaatgtggcctgggaaaccaccaaatctttgaaagtagtggaaagttacacttgaagtggaggctttaggtgtctaaaattgaaggcttttgcaatgctgaaaagtagactttgtccagttggtagcaggttggatttgaggcagtgttcacgaaagggctgtttaactgtctcagtcactcccttctgggaatctgttccttctgcatttgaaaaggggccagcgtttaattattaaaacattttcaatttttcttgctctttttcccagccctcatattcgaagttttgtttcaggctttatttccttatctcagcactatttgtgttaagtttttattgcttaagtcagatgtcagtacgaagcatgggaaatccagaaagtgtcttagacactcatgattggtttttggtgcttgttaggtgaatcttttacctgactcatataataatgtactttattgtcactgaaatactgtctagtgaaccagttggcagcagatatgaaaggttacctacttgttgaaggtctagggtacagcggtggaaagagatcagatagcccaaaacaggaagtcaagtgcaaacaggatgtgtttgtctgctgtaactcgtgtgcctgtgttttgaaacttggtgctgttaaaaagtcaagacttctagtatttgagcttggctgaagaagtctccattttgggtttgaaaagaagctaacataactagtcctttacagcccttgcctttacccatatgcatgtctttcttgtagggaccattctttcttcctgggcatggttgtttatcctagtttatactgtactgcatccatatggtttataaaatgaagccactgaattgactgttgatgttacttttggtagatatgggattcagtctgtgtttggctatttttttaaataacaatgggaaattttagcctataattcacaatccttttattttttatttattttttattgttttgagacaatttcactcatgttgcccaggctggagtgcaatggcacgatcttggctcaccacaacctccgcctcccaggttcaagcgattctcctgcctcaacctccagagtagttgggattataggcatgtgccatcacacctggcaaattctgtatttttagtagagacagggtttctacatgttggtcaggctggtctcaacctcctgacctcaggtgatctgcccgcctcggccttccaaagtgctggcatgtgccattgtgcctggcctccatccttttattttaattaattttttttttttttttgtagagcctggggagtggctcatgcctgtaatcccaacagtttgggaagctgaggcgggaggatcgcttgagcccaggagtttgagaccaacctaggcaatatagtgagacctccgtttctacaaaaataaaaatagctgagtatggtggcatgtgcatgtagtcccaactattcaggaggttgaagtgggtggatcacctgagcccaggaggtcaaggcagcaatgagccaagagtgcatcactacagtccagccttgacaccagagtgaggtcttgctatgttgcccaggctgcgagctggtctcaaactcctggcctcaagtgattctcctctcttggcctctcacagtactgggattacaggtgtgagttaccacacctggccaccaccttctattttttaatttttattttttgagactgggtctccctctcacccaggctggagtgcagtggtgcaatcacagttcactgcagccttgatctcccaggctcaagtgatcctcccacctcagccacccagtagctggcattacaggtgtgagccactacaacaggcccattttttttttttttttgagatggagtcttactctgtcacctaggctggagtgcaatggcgtgatctcagctctctgcaacctctgcctccatggctcaagcaattctcctgcctcagcctcctgagtagctgagattacaggtgcccaccaccatgcctggctaatttttgtatttttagtagagacagggtttcgccatgttggccaggctggtctcaaactcctgacctcaggtgatcagtccacctcggcctcccaaagtgctgggattacaggcgtgagctaccacacctggcccattcttttaaataacagtctgcttttgttggtttccagaatttttagcctatcttttgagtgttttctgagtgtggtggtttacaaataactaccgggtgtttgtgaactttttttagtctttgaattcaaactctctttgagtactggaggctgcatctaatgctagctgctgaattgcttcaccccttggcaagtctctggagaagagattaagtaagtaatttgcttggggtcactcagctgataaacaatctcagcagcccctattttctgaacccacctcccatttcccattgcttcctactgtgaaatctgctctattgcattcattagaggactggattggttataggataaccatctgctcgagtcatctcaggatctttgtagattatcacaaccacttgaaccaggtccattctgctggtctcatactataatatgggacaggtaaaggttttgataatgtgtttgtgtgtgtgtgtgtgtgtgcattctgtacccttaccatattgcagagaaaatcatctgtccttccactttgtaattccaggagcaaaagggtaaagtagcagcatatctcagtgtggatggtctagtgactgtgtgtgaaagcagtgagaacaacatgcctttctgctatcagcacaggtgtcttttttcttgactcttatcaaagggtgggaatatgaggcattttgcattttgttgtgggatataggcaaatagtaaaaccttgaagataggctgaacacaggtgttcttggcaaggagagaatatggtgaaaatacaaaggtttttgtgacaccaagagaactagaaatcaccattcatttctgctgcttggcgtagatactgggtagatcacatcctcctggcaggagcagaaaacatttcagaaagtcagcataattttcagattgagatcaaacatcaaaccaagctaaaggtctgtgggaggaagggggtgcttagtctgaattcatcctggatttatcaccaaatcctatctgacttcagtgcagtgcaagcaattacagtgcatcaggtggaggccggaggcatacgttcattctttgaatttggcagagaagggttgaggagctaagggagaaattctaaactggctggactgcagggttgtggggagtaacaaactcattagcaatggggtggaattgggaagagatttaacagcctggggctgcaaggaggataaaccactctgaccacctctgagaagtttttcaagggattatataattaagaactggtggaagaactgtagtcatttaattcttagaggagtggttcaaaaactaaactgaacctgattagaggtattggcatacctaaatttttatttttttaattaattaattaattaattttttgagatggagtctcgctctgtcgcccaggctggagtgcagtggcgtgatctcggctcactgcaagctccgcctccttggttcacaccgttctcctgtctcaacctcccaagcagctgggactacaggtgcacaccgccactcccggctaattttttgtatttttagtagagacggggtttcaccgtgttagccaggatggtcttgatctcctgacctcacgatccgcccacctcggcctcccaaagttctgggattacaggcatgagccaccgtgcccggcccctaaatttttaaaaagcagatagatagaggaatagaactgataaacgtctttttaaagaaccttaatgggctgagtgcagtggttcacgcctataatcccagcactgtggaaggccaaggtgaatggattgcttgaggtcaggagttcgagaccagcctggccaacgtggtgaaaccccgtctctactaaaaatacaaaaattagccgggcatggtggtgggcacctgtaatcccagctacttgggaggctgaggtatgagaatcgcttgagcctgggaggcagaggctgcagtgagccaagatcacgccactgcattccagcctgggtgacagagggagactctgtatttaaaaaaaaaaaaaaaaagctgggcatggtggcttgcgcttgtagtcccagctaatcagaaggctgaggttggaggatcacttgagcccaggaggcagaagttgcagtgagtgagaccatgccactgcactccagtctgggcaacagagggagaccctgtctgaaaactaagtaaaataaaaaagttaagaaccttaatgggcctttctgtgttaaaacaacaacaacaacaacaaaaacaaccttaacaaagtactttctttaaattatttacagccaatttctgttgaacatccattatttgctgggctctgggttaaatgctttgacatgcgttattttaatcctttcaattatcttttcaatgtagcaggttttaattaaaggagttaaataacaccagaattcattctataccatggtacatttggctgcagtaattttcgtgcagtccactttggaaaggtaaattgcataattttgagcctagatagaattcctgtctggaaatgccttcttttcccggtgcattggagtgccagaaaccccttcacctagtccctgccttcatttaaaaaaaaatcctggttacccattagtcagtcattgtgataatatcttgtgaaagcagcttcttcagtagaaggtccagaagagcttatctggtaaatcctctttcctgcaccagagtagtagggggatcagagtctctttattcttgatgagctttgtcatcagtttcgatggaagaaggatcctgctgtaattaaactgcaggtccatttattctgttttcagcgttgttagaagactttactctgaattgctttgtttcctgattgactcaccctttggggcagaatgcctgggttgaaatgaaagcgtaggtttctctgctgcggtgttcaatctgtcatctctcctaaactccacactaagaagcagccatttaattggtcagaccccaggggtgatattttggcacagctccattggttagaattacttttccctgaacttcatagcagatgctgaggtccctctgcagatatttgtcatagaatagttgaaaccagggagtttctgagaacatttataacttgtgattattatgtatgtctttcagttgttaacagttaccgcttaagaaaaagagctcacttattgctagtgggaagtgaaatctctctcctttcccccttattcatattattattttaacagtttatgctccaagaccctctgctctctggttcctgtatcattttgttatgtttctccttccaccttgcttgggctgtgcaagtcgggaagaacaggcaaaggtacacccagacctgggtgtgtctggtagaggtcggtttctttgatttctagcatgtctttattttacatctgcatttgttgttttcatgtttatttgtatttgcagttcccattgcagcaccattccaatccaaaacaacagtgaaggcattgaagccttctgtgtctttttaggaagagatggaagtgaccgtcttgttcctcttccaggctctccttttctggttttgtccttctgtaataacaatttaaaccatttttcttttcttttgtttttcaagtaatcttagcagacaaagaaattctcttcagtctttcgttcaaggtattgctgtggttatgtgtgtttaaaatccttaatttactgatcatcccggaatcataattgtgcagtttctgtcctttttttttttttttttgagacagagtctcactctgtcagccagggtggagtgcagtgtgcaatcttggctcaccgcaacctccgcctcccaggttcaagcgatactcctgcctcagcctcccgagtagctgggactatgggcatatacaccaccacgcccagctaatttttttatttgtagtacagatggggttttgccatgttggccaggctggtctcaaactcctgacctcaggtgatccgccggcttcagcctcccaaagtgctgcgattacaggcgtgagccactgtgcctcgccaattgtgcaattttaagcatgaatttctgtcctttttttttaaaaagcgctctattgctgttatcattagttaataattcaacaaatatgtgttgattacctggcattaaggctgagaataaagctgtgaaatagacctactcttgtttcctgtttcactttccacaccctaaatatggaagaaaaatactttaaaaagaattatataggccgggcatggtggctcatgcctgtaatcctagaactttgggaggctgaggcgggcaaatcacttgaggtcaggagttcaagaccagcctggccaacatagtaaaaccccatctctactaaaaatacaaaaaattagccaggcatggtggcacgtgcctgtaatcccagctactcaggaggctgaagcatgagaattgcttgaacctgggaggtggaggttgcagtgatctgagatcatgctactgcactctagcctggacgacagagtgagactctgtctcaaaaaaagaaaaaaaaaagaattatacaaactgttagccagttgattagatacagtactgctagaatgctctttcccccagaatgtaatcattatgagattcaaggaccttgcctgttgttgttcctcttacgttctccagaggtacaggagattcatgctaaatagtctgataaatcaattatggttataaggaagtgtataagattctatgaggccaggcatggtggctcacacctgtaattccaatcctttgggaagttgaggtgggaggatcacttgagcctgggagatcgaggctgcagtgagctgtgatcgcaccactgtactccagcctgggtgacagagtgagaccctgtctcaaaaaaaaaaaaatgttatgagagcacagacaggatcaggaaaggtttccctgaggaaataaatgatatgtaagggaggtgaggtggcaacagtgctccaggctgagagaatagctgaatagcttgagggagggagattcctaaagccaaaataaccttggtgtttgaagaactgaaagaataggatagagtaaggagtaaggccctgagcactaaggatttgctttcattattatttactagttacccagtgacaacacttactttattttttttgagatggagtctcgctctgtctcccaggctggactgcagtggtgcagtgtcgagtcactgcaacctccacctcccagataagcgattctcctgcctcagcctccgtgcagctgggattacaggcacctgtcaccatgcctggctaatttttgtatttttagtagagacaaggtttcactgggattacaggcgtgagcctgccgcgcctggctgacaacacttattaaaaggagggtagaccaggtgcgctggctcattgcctgtaatcccagcactttgggaggcccaggtaggattgcttgaggctaggagttcaaagaccagtctgggtaacatagaccctgtctctacaaaaaaaataaaaataaaaaattagctgggcaaggtggtgggtatttgcagttctagctactcaggatgctgaggtgggacgatcgctcaaggctacagtttgctatgatggtgccaatgcactccaggctgggtgacagagacttgtctcaataaatgaatcaatgaaatagagcattagttgcagttgagacaattaagtcagaaaaatctcaactggagcaaaagtaagaagagaaactgaaatacaccttaaatatcagttaaaggctttatctttagaaggttgggggtctgtatcactggtaccctgaacttgtagaaactagaaatgcagatgacttatgggatgtataaattaaagttctgtagtcccaggaatggtttttctatgtattatactttttacaaggtgcttaaggtactttttattgaatcctacaaaaatcagaccattttaattctgatttttgtaggattattgtgttaaataagacaacagatgcaaacataacaactaacttggcacattttaggtgttttgtaatgtttttactttgtaatcttctgagaaaggacttcaggaaccccaagttctgaataactcccccaattttccccgtgtctgccatctgaaataatagcacagaagattatgtcatgtctaaagttttgatcctttacattaaagtataacttggggactggaggagagaagaggctctagtccttgtgtctttgatgttactgacatctctgtgtgaaaggaggctctggaagctggtttggagagaggcaaacatttaatcctcatgagcccatgccttattataatgacggctatttactgaatgtctaacactgccctctgctcttgatgtaagattgaaaagtccagtgaagttatgatccccctttatactgagcaccacctctatgtccagcctgtgaggtgtagggaatgtattcctgttactctgaagctcctagtggcagcttactcaagctcattcatttattcagtgttagagccaggatttaaggtcaggtctgactgattttaaagccaaagtaaaacatacttgggaacagctttttttccccccacctttctctccaactgttctgtcttcttaaactttagacctaaaataaaattcttacctaggaaatatgcatttatctgttacccatatccaaaggactgccttggaggatagaaaatgtctattagtattaaaagctttggaaatgttttcctcccctgagttctggcctgtgaaatattccttgtttatgtccagcccatgcaccacttcagcagggctctttatcctaattcaggccttggattctaaagttctaccatatacatgtcttctctatgacttaggtattctgaattcttttttcttttctttttttttttttttttttttgagatggagtctcattctgtcgccaggctggagtgcagtgatgtgatctcagctcactgcaacctctgcctcctgggttcaagcaattatcctgccttagcctcctgagtagctgggactacaggtgcatgccactacgcccagctaattttttgtatttttagcagagatggggtttcaccatgttggctgggctggtctcgaactcctgggcgctcaggtgatccgcctgccttggcctcccaaagtgctgggattacaggtgtgagccactgcgcccggccaccgaattatttattctaaaataaatatctcagaaatagtatcacagagaacatgcttcattgtcccacccccagcatatgagaccagttagtagtatggtttactcagcaggctgcttacttacaaatgcaacagttgtcctattttatgctcattgtgttgtcaccagcattttaaatctttacaagtcagggtgggtacctcaggcaggtttgctggaaaattccagtaaacagtttcaaaggagttcaagttgcttgccagactaacttacttttaaaagtaagcagccttccaagttaagagatgattttaaatttcaggtgagttctcaggacattgtgattttttaattatgctgttggtataaatcagctgtgtcagggcctgtcccaccaagagcgttgggtggtaagaaacccaagctttgggtgaccagagagaggagagagaccttgggctttccagccagtaatgcctatgaaacatgtaggtcattggcattttattttatttatttttttgagatggagtctcgctctgtggcccaggctggagtgcagtggtgtgatcttggctcactgcaacctctgcctcccgggttcaagcgatacttctcccttagcctcctgagtagctgggactacaggcatgtgccaccacaccactaatttttgtgtttttagtagagacggggtttcaccatgttgtctaggctggtcttgaactcctgacctcaactgatccgcctgccttggcctcccagagtgctgggattgtaggagtgagccaccatgcccagccatcattttagaattataatttttagctggatgcggtaaaaaaaatcctttctcagccttcaggtctcatctcaagtatcaccgacatgaggagtcctcccccatttacacacaccagctcggtgtgaagaaccgaaaggtcacactacctttcggttcttcacacaccagcccactatggcttgaagttaacgagtgagaaaagtagcacggcatgaattggagaagtggtcagggtctttaaccatgtaagaagtgattatttttattctaaaatgcaataggagtccattaaagaacttttttttgaagagtttttaaacatttttatgtacaaagagttaacatgatttctttcattgggtggatgccttggataatccatccaaggaagatcacttctaggaacaagcaacattaaagagctttaagtgtgtgtgttgaggggaggagggcagtgggtgatgccttgtggagaaataggtggatagaggcaagaattaaagctaggaaacccgttaggaggctgttcttttacccaagaagccattctagactctggaaattcggtagagcacaaagtccctgccctcatggggtttctattctagttagggaaagcagttaataaataagcaaataatatcagctaataccaaatgttatggtgaaattagaaaatgacattaaaaggctggtcgtggtagctcacacctgtaatcccagagctttgggagcctgacgcaggaggatccttagagcccaggagttcgagattacagtgagctatgatcaagccactgcactccagcttggagagagaccctatctctctctccctcacacacacacacacacacacacacacaccaaaaaaaaaaaaaaaaaaaaaaagacattaaagctgatgtttggatgacaagaaggagctaagcataggaagttctagggagaccaatccaggcagaaggaacaaacaacaaatctaaagggcctaaggagggaaatgtgattaatatatgaaagatgatgttttaacccaccagcaggagcaggggagatgaaggtaggaatttatgcatctttgatttaagaaaagtattttttattttttttttactttttttttttttgagagagagtctcgctctgtcgcccaggttggagtgcagtggcatgatctcagctcactgcaacctctgccttccaggttcaagtgattctcctacctcagcctcccaagtggctgggactataggtgcctgccaccatgcctggctaattttttatatttttagtagagacggggtttcaccatgttggccaggctggtcttgaactcccgacctcaagtgatctgcccgccttggcctcccaaagtgctgggattacaggtgtgagccaccacacccggccaagaaaggtatttaaagcaacctgaggtgtggttggagagggaggcctaagacagcctggacactcacaacatttaagaacagagggaggggtaagaagcagcaaaaaggctttgaggtaggaggaaagccacgggggcagagtgctagaagctaagagatgtttagagggggagagtcgcttgtgtccagcattgctgagagattaagatgaggatagagaagtgtcaattagatctggccacttggaattccttggtgaccttgaagagattaggaatggtggttggctcaagctagattggagaaggtttaagagtgaattagaggttaagaaagtggagtcggccagatgcggtggctcatgcctgtaatcccagcactttgggaggccgaggtgggcagatcacctgtggttgggtgtttgagaccagtctgaccgacatggagaagccgtctctactaaaaatacaaaattagctgggcatggagttgtatgcctgtaatcccagatactcgggaggctgaggcaggagaattgcttgaacccgggaggcagaggttgcagtgaactgagatcgtgccattgcactccagcctgggcaacaagagtgaaattccgtttcaaaaaaaaaaagtggagtcaaatatttggagaaatttgatttagaggagatcacagaaaaagagctttactggggagggggagaatgtggggtcaaaatggggttttattttttatttttttgttattttttacaaattacaaatatttgactaggtgctttaaaaaatctgtcattggctgggcgttgtggctcatgcctataagcccagcactttgggaggccgaggtgggcggatcatgacgttaggagatcaagaccatcctgcccaacatggtgaaacgccgtctctactaaaaatacaaaaattagctgggtgtgatggcacgtgcctgtaatcccagctactcgggaggctgaggcgtgagaatcgcttgaacccagcaggcggaggttgcagtgagccgaggttgcgccactgcactccagcctggcgacagagcgagactgcgtctcaaaaaaaagaaaagaaaaaaatctgtcatatgggctgggtgcaggggcccatgtctgtaatcccagcactttgggaggctgaggcgggtggattgcttgagcccaggagttcgagatcagcctgggcaacttgatgaaaccccatctagacaaaaaaatacaaaaaattaggtgtggtggtgcgcgcctgtagtcccagctactcggcatgctgtggcaggaggatcacgtaagcctgggaggtccaggttacagtgagccatggtcgcaacactgcactccagcctgagcaacagagtgagacaccctatctcaaaacaaaacacaacactcatataaacttttaattcaaatgtaactagagaagtatataaattataagtgtacagttcgatgaatttttacaaagtcaacatatctacataatcagcattcagagtaagaaacaatgttaccagaagccccttgggctgccttccatctgtaatcctacctcacaggatgaccactatcctgattttgaacaccatagtttgcctgtttttgaattttatgtaaaacgaatcatttcccatgtattcatttatgcctcctgcttttgctcaacataagattcatctgtactattgcatgtatcagttgtttgttttttctcattgttctgtgaacatatcataattctaccgttgatggacacttcagttgtttccagcttgaggctattacagtagggcttccatggatattcctgtatactgtttgggtgaatgtatttctgttgggtatatgcctggaagcagaattgcaaagccatggaaagagatgtgggtgcgcgtgtatatgcacgcgcgcgcacacacacacaaaatttccaaattggagtaatttacacttccaccagcaatattagagttccagttgctcttttttccttttttttttttttttttttgagacagttttgctctgtcatccaggcaggaatgcaatggtgcgatctgggttcactgcaacctctgcctcccaggttcaagcgattcttctgcctcagcctcctgagtagctgggattataggcatgtgccaccacgcctggctaattttttgtatttttagtagagacggggtttcaccatgttgtccaggctggtctcgaacttctgacctcaggtgatccgtccgacttagcctcccaaagtgctgggattacaggtgtgagccaccatgcccgtctgctccagttgctctttatccttatcaacatttgctagtatctctttttcattttagctattccagtggtggtaacactttgtggtcataatttgtacttccattatgacaaagaagagtttttaacacctgggagattctggagcatacctgtatgatgataggaaagttcctgtagagatggaaagcaaaagctcagaggggatgggccacagggtagacagattgattttttaaattaaatcaggactacatctcaagagggtacgcttcagggtctaagtgaccaaggttcaaagcttggctttgctatcctctagctgtgacctttaacaagttacttaacttctctgaacctttttttctcacctgaaaatgggaagaactaatctaccttgccagaattgtgaggatcacatgagataacactaggtaaaagtacctatctcagtgcctggcaaataagcattcttccagcagagagtggctactttcttctttacttctcaaaatatgtaattacttatgaattattttagagaggcttagcctaagccctgttgatagacttttcacagaatttcctttcaaaaccattgcaattgtctttaattgctttttaatgataatacacaagatgaagctaagcccattctgtactaatgattcataatgtgggatacttttctttatgcactaacaacatagatgcttttaaccattccagaaatacgttagtgacagtaggcgtaccaccctcaataaactggacatgattctgtaaggcttgctttccagcccttttctgatttgtcatgtcagaaaggcatttctttaaggtttgggggcattttatttaggtattttaaaaggatttttgtaaacttttatacaatggtgcaccataagtgtgttaattccaagatgtagctgtctatgcttttgtgtaaagcctgttgttgcagaactaccttggtgcacagagcagttaattaaaatcagaatagattggatgagaaccttgggaatttttttactgccttagttttttggtgtctttggagttacattgcaaaccagcatggcccttctactcctctctccccttcatgggaagacccatgacaaccactgatctgctttaaatcatttgccttgggcaggtgaacaagcggagaagtgttttgaaactacttaggaatctaggacttaataggtagaaatcacattatctaccctcttgcctctaactatgactgtaccaagcccacctggaataggtaatttatcttattctgttattaacactgttattttcctgttcagcagggctaactctcccaagaaatactagcatacttatcaagctgacaaaatcctacatgctagctagccattcttgcctcatatcacaaggttcttccacagggaatagtaaatgtttttattcactactggccctacatctcccatttttctcccttttagggaaagtggaagaggagaccctagcaggcttcaagcaagctctgtaggacagcagttagacactgtttttgaggactaaattgccaagtctgtcttttaagaagagggtgaggggagtttgggaaggaatgttcaagccctgagtgaagatccaataattttctttcaagatcagaaggaggtttgtagataagagagaaaagtttttcatttatcaccttagggagaattctttctacacctcacaattagttccactttcagtcctttaatagcattatcaaatgccatgtatgtatatctatttagggatgaggaatgaaaaaaatattcccaagagaaaagtattttagcttatatagcgttgttagttacaaactctttccttccgccctctgaaataaccctgaacgtagttgttatttagggttagggctttccagtttggcaggagagtacttctaactgaccacattaggacatgtttcttttttggtatttaaatatctgtcagagtggccgggcatggtgctcatgcctgtaattccagcactttgggaggctgaggcaggtgtatcacctgaggtcaggagttcaagaccagtctggccaacatggtgaaaccccgtctctactaaaaatacaaaattagccaggtgtagtgatgcacacctgtagtcccagctacgcaggaggctgaggcaggagaatcgcttgaaccctggagatggaggttgcagtgagctgagatcttgccgttgcactctagcctgggtgacaagagtgaatctccatctcaaaaaagaaaaaatttatatatatatacatatatatatggagtaaaatatatatatagatataaatatctatagatatagatacagatataggtatataaagagtaaaagcctagtcggctgactttggcaaacctgttctgttagactgagcaggtctaaggtatgttaacactggagaatcttgccactacctgatctttcctgtaataacccccttccccacatatgtatattcctagcataagacttcattctccacctaaacttggagactgtggggtggcagaatggcaattttttttttttttttgagatggagtctcgctctgttgcccaggctggagtgcagtggtgcaatttcagctcactgcaacctccacctcttgggttcaagtgattctcctgcctcagcctcctgagtagctgggactacaggcatgtgccaccatgcccggctaatttttgtatttttagtagagacggggtttcaccatgttagccaggattggtctcactctcctgaccttgtgatccacccacctcagcctcacaaagtgctgggattacaggcctgagccaccgcgcccagccagccttctttttaaaagtagccagatgacttgaataggctgatagctcttctttcagagatgttcagaagaggcacttaaggttagaaccaaagttaagagaataaaaatagtgtggaggaagatgggttctcttgactccagctaaagaagagttttcttctgtcttgtatcaagatgttcaagttgagctatatgcctttcaaggctccaaatcccctcgggacaaagacctagtcgaaatcacttttggtgtttccagtacccacaatatagctggtgcttcgtaagtacattgatttttgctgggcgtggcagctcccacttgtaatcttagcactttgggaggccaaggcaggtggatcacctgaggtcaggagtttgagatgaggctggccaacatggagaaaccccgtctctactaaaaatacaaaaataagctgggtgtggtaactccctgttgtcccagctactcgggaggctgaggcaggagaatcgctttaacatgggaggtggcggttgcagtgagccaagatcgcgccattgtactccagcctgggtgacagagtgagactctgtctcaaggaaaaaaaaaaaaaagtaacgtggatttaaacaatatacaactttccagtttttcctactgattgtgccttaccaggtgggtctgcctattttgtgcaaagtccttttaggaaaaatttacaacctgtagattccttgtgtggaacaaaagtttatttttttcatgtggctaaatctatctcccctttccttttttatttttttaatttttgagacaggaacttgctctgtggtgcctagactagagtgtgctgtggcatgatcatagctcactacatcctcctggactcaagtgatcctctgtcctcagcctctcacatagctgggactacaggtgcgtgccaccatgcccagctaattattatcattattattattattattttattttttatttttttgagacagagtctcgctctgtcacccagactggagtacagtggtgcgatctcggctcactgcaagctccgcctcccgggttcacgccattctcctgcctcagcctcccgggtagctgggactacaggcgcccgccaccacgtctggctaatttttttgtattttcagtagagacggggtttcactgtgttagccaggatggtctcgatctcctgacctcgtgatccgcccacctcggcctcccagagtgctgggattacaggcttgagccactgtgcctggcctattattattattttttatagagatggagtctcagtgtgttgctcaggttgatcatgaattcctggcctcaagcgattctcctgccttggcctcccaacatgctgggattatagatgtaagccactgtgcccagcccctttcctgtttattttgtactttcacttttctattgctaatactataaatttatatttggttatacctgccttcacctctgccccactgtctggtgaatgaggtgacttttatcctgcccgggaatagacctaccccctaatctgatcacatgatcacttctttttcttatgtatttatttatttatttatttttgagacagagtttcgctcaaaatgcccaggctggagtgcaatggtgtgatcttggctcactgcaacttccacctcccaggttcaagtgattctcttgtctcagcttccccagtagcttggattacaggcgcgtgctaccatacccgggtaattttgtatttttagtagagatggggtttcaccatgctggccaggctggtctcgaactcctgacctcaggtgatctgcccacctcggcctcccaaagtgctgggattacagccatgagccaccatgcccagccatatcacttctttttctactccagcctttactcctattccaatcatttattgtcagcttcacttcctctacagtctcttaatcttttggggactcctcagcagtttgtgaatatgtctgcatttatcctggtgacactggatcttctttagcaactgcctcctctcttcctttcattttacagtcaagtttcttgaaataataatttatccttggaattgtgtgaattcatacttctcattcactttccaagctatgattatcagcttctttcttcctaaactgcttaggcaaagagcacacatggacactttcctaaaccttagtccattgggcattttgcattcttcattgtattgtgttctctgagacatttgacagcgttgataatttcttcttgaaactaaaaacactcttccagttccccctgctctgagcattcttttttcctcttttctgctgtgggctttcccctgcttgccctatagatgtggttttcccatgccttcttctcttctgacccagaccatctaatcagcctccggccccactctggctttacgtacttccagtgggccatgtgttcccaaacctttatcttcagcccaaacatgtacctgtgtatacatcagcatgtcccatgagtacaaaactcaactcatcatcttaacccgtccctattctccacacacagatacatgcctcctcctgagggcttcatttcagtaagtaattccaccatctattctgttgtgtaattcagagaccctagactttgtcctagactctcttttctctcccccttctctcgtctgctagttcattctgctcattctatcagatctgcacctttttaaaatttccatatttacccatcttgcctctctactgcagcaacttcctgcttccagctggccccttgctgatctgtcccacacactgcttataagtgtgcactctaatatgcaaatgagacaacaaaatgccctaatcgtgtcccattacgtataggatccagtccaggttccttaccagggaataaaaggtttttcttggctctttgtttactacttgtaccctcatctactccctgccttgctccctgacccaaccaagcattttgtagtttctttttctttttttttttttttttgagacggagtctcgctctgtcgcccaggctggagtgcagtggcgcgatctcggctctctgcaagctccgcctcctgggttcacgccattctccttcctcagcctcccgatcagctgggactacaggcgtccaccatcacgcctggctaattttttgtatttttagtagagacggggtttcaccctgttagccaggatggtcttggtctcctgacctcgtgatcctcctgcctcggcctgccaaagtgctgggattacaggcgtgagccaccgcgcccagctgcattttgtagtttctttaatgccatggtgcatattacttgttttctgttgaaaattccttctcttcttgactttctggtaaagtcccagttactcccacatcatgataggatgtgcggcacctcatttgaaaagtcttctctggtcacccctcttcccctgtagagctgatcatttccctctgtgtagcctcccaataatacatggtgcaaacctccgttaaagcactgatcaccctgaaatttcaatatttggtttacatttctagtaccctgactagaccatgagctccttgagggtaggtacttaaccttccttacctagcactggaaacagcaaggcactggtttcagtaaaagttgcatgcatcatgaatgagtagagagtttaacagaagttagtgaattggccaggtgtggtggctcacgcctgtaatcccagcactttgggaggccgtggcaggcggatcacctgaggtcaggagtttgagaccagcctggccaacatggtgaaaccccatctctactaaaaatacaaaaattagccaggcatggtagcaggcgcctgtaatcccagctactcgggaggctgaggcaggaaaatcacttgaacctgggaggcagaggttgcagtgagctgagatcatgccactgcactccagcctgggcgacagaaggagactccatcccaaaaaaaagttagtgaattgcctacaaccttgtcctctttgcaggggacaagcccagaaagccagatggtaattgttgtgaaatctgtaggtttattaggtttattttgtacctttgccttcccagaaaaattgtagttaaaagcattgttataatgtggataacaacaactaatgtttatatagtgctttatagcatacagactgtccagaggagaaaaatgaagtacagaaagtctattacttgttagagggaggtaacacagcccttaagtaagtagagcaggacttaggactgaggccttcttattccagattctatattctttttattattacatactgtctcagatttgtctgtcaacgtgtgatttaaagaattacaaaatttggctgggcatggtggctcacaactgtaatgccagcactttgggaggccaaggcaggtggatcacttgaggtcaggagtttgagaccagcctgggcaatatgacaaaacccagtctctactaaaaatacaaaaattggctgggcatggtggttcacgcctgtaatcccagcactttgggaggctgaggtgggcagatcatgaggtcaggagatttgcccatcctggctaacatggtgaaaccccatctctactaaaaatacaaaaaacacacacaaaaaaatgctcaccatcactggccatcagagaaatgcaaatcaaaaccacaatgagataccatctcacaccagttagaatggcaatcattaaaaagtcaggaaacaacaggtgctggagaggatgtggagaaataggaacacttttacactgttggtgggactgtaaactagttcaaccattgtggaagtcagtgtggcaattcctcagggatctagaactagaaataccatttgacccagccatcccattactgggtatatacccaaaggactataaatcatgctgctataaagacacatgcacacgtatgtttattgcggcactattcacaatagcaaagacttggaaccaacccagatgtccaacaatgatagactggattaagaaaatgtggcacatatacaccatggaatactatgcagccataaaaaatgatgagttcatgtcctttgtagggacatggatgaaattggaaatcatcattctcagtaaactattgcaaggacaaaaaaccaaacaccgcatgttctcgctcataggtgggaattgaacaatgagaacacatggacacaggaaggggaacatcatactctggggactgtcgtggcgttgggggaggggggagggatagcattaggagatatacctaatgctaaataacgagttaatgggtgcagcacaccagcatggcacatatatacatatgtaactaacctgcacgctgtgcacatgtaccctaaaacttaaagtataataataaaaaaaaataaaaaattagccaggtgtggtgggcgcctgtagtcccagctacttgggaggctgaggcaggagaatggtgtgaacccgggaggcggagcttgcagtgagctgagatcatgccactgcactccagcctgggcgacagggcaagactccgtctcaaaaaaaaaaaaaaaaagaaagcaaaaattagctgggcatgatgacagctgcctgtaatcccagctactcaggaagctgaggcaggagaatcacttaaacctgggaggcggcggtttcagtgagccgagatcatgctactccactccagcctgggtgacagagtgagacccctgtctcaaaaaaaaaaaaaaaaaaaactacaaaatatttcagagggctattcctcctctgttgtccccatttctcttggcagcaaagaactcatttactttatcatacacacactctgtgaagaactctttacttcattattccatgtgaactgttaattgcaagtaaaggcagattacttgcaattcttattctaggaacttaagttcctgggaactaagttcctctcctgggaacttagaaccctcagacaggttatattgagtcagagagaaatgtttctgatgtgctgaagattgaacaaatgtgtgattagttaagacttagatattgtatatgattaattcatttgctagttcttgttgagctacctgtctaattgggcactgttagactatcacaatccctgttgtcgtgggggttacaggcaagttacaggccagttggggagacaggtgttaatcagagacccctgcaagggagcgaattatatcacaggtgcagtggaggcagtgttggaaagctaaaaaggacctagagaagtgaagaggcctgaggttatgagctatttgacctaggaagttacttccccttgctggttctcattcttttttcctcgatgaaataacccaggttgaatcagttggcttcttagttccttctagcttatgaaagtgcccttgttaaaacaatgagtcaggagacagcagagcattctattgtgtgaactgattatcaaataataacactaaatgtttcatttattgtctctgtaagcaaagagttcaggctcaaagtatctacatgggctgctttagtctactgagaaaaacatactcatatctcacatcaatgcttggcatttgagtgggccctcttacaattgttaggttattctgacatttgagggattggatccagatcctctttgttttgtgatcgtaaaaatcatcagccctttgtccccagtacctgcatttgatatgtactatgggagtaataaaccaacactttttttttttttgagacaaggtctcactttgtcacccaggctggagtgtagttgtgcagtggcacgatctcggctcactgccatctccgcctctcaggcttaagtgatcctctcacctcagcctcctgagttgctggattacaggtgtgtgccaccacacctggctgatttttgtatttttttgtagagatgggattttgccatgttggccagactggtcttgaactcctgagctcaagcaatcttcccaccttggcttcccaaagtgctgggattataggcgtgagccaccacacctggccaacgcttctttttttttttgagatggagttttgctcttgtcacccaggctggagtgcaatggcacgatctcccgtcactgcaatctctgcctcatgagttcaagcaattctccagcctcagcctcccaagtagctggggttacaggcgcctgccaccccgcccagctaatttttatatttttagtagagacagggtttcaccatgttggctaggctgctgtcgaactcctgacctcaggtgatccacccgccttggcctcccaaagtgctgggattacaggagtgaaccactgcacctggcccaacacttttttttttttttttttttgagacggagtttcactcttgttgtccaggctagagtgcagtggcacgatctggggtcaccacaacctctacttcccgggttcaagccattcttctgcctcagccttccgagtagctgggatttcaggcatgcgccaccacaccctgctaattttgtatttttagtagagatggagtttctccatgttggtcaggctggtctcgaactcccgacctccggtgatccactcgcctcagtctcccaaagtgctgggattacaggcgtgagccactgcgcctggctccgaacacttcttaataaacctacagaggctctgattcagtaaggaagcaaatatttgttgagcttctacatggacaacagtgctagggaacagtactgtacataatgaataaatatcccctgccctggaggaatttatggcttagtagtagaaaataaagagcaagatataactgtgcaagaaagtataataggtgctgtgatagaagtttatctaggattgggggtacaaatgtaagagtagttttactggctggcaggaggggaaatcaatgaatggacaacatagtatagggaaaaggatgttaggtttggagtcagaagacctgggtttgtagaatctcaactctgtatattagctctctatatattggctatatatttgatttctttgagtctgggttgcatcatttatataaagcaatgaacaatagtcttccccagctcagcgccatggctcacgccttaatcccagcactttgggaggccgaagtgggccgatcacaaggtcaggagttcgagactagcctggccaatgtggtgaaatcccatctctactaaaaatacaaaaaagccgggcgtgatggcgggcacctgtaatcccagctacttgggaggctgaggctggagaatcgcttgaacccaggaggcggaggttgtgatgagctgagatcacgccactgcattccagcctgggcaacaagagcaaaactccatctcaaaaagaagaaaaacaaaatctgtttgaaaacacatcctcccctccaccttggtggcatgcgtgcattgagtgtcactgctcacctgtgctctcggacatcaaaaggacagtagaggtgtgtcttaactctgaccttttcccctttcctcccttgcaccagattttatcatgtgggcaacctgctgcaactggttctgcctggatggacagcctgaggaggtcccaccaccccagggagccaggatgcaggcctattccaaccctgggtacagctccttcccttccccaacaggcttggaaccaagctgcaagtcctgtggggctcactttgcaaacacggccaggaaggtgagtgctgacttcttggcctgctctgccactgcagcctatggaccatgggcaagcgccactgacccctctgaatgcctgcaacctttcctttccctgtgtgatgctggtgacccagagctgtccctttcacaaaaatgttcaagaagaactaactgagtaaaagcaaaagcaaagcatgtcagcatagatttggagtcagtagacctaaattcagttatcagcgttgctacctactagctatatgatctaacctctcttgagattcagtttccctgttataaaatggggatgattgtagtcctcatctttcagggttgtgggaataaagtgagacaagaaagccatgaaaggtgcctagcacaatgcttagaatgtcgtaggcacttgatgttatttccatcattagccaccatcacaaaggcctgattgcagattaacttgttctttttatcaaaagcaacgttaaggatgcctcaggtacatgaagaccataacaaagactggagcttatttactgtagcagatttcatttgaaatgcttgggagccatgcttcccaaatgaatgagctggaaaaaaaattactggctagataatggtgtctaggtgtgcaccctccctcttccagaggcagtgagttatctgtgatcaagcatgactaggcagaaggtaaaccctcacctggataaagaactcctgcattctgcatttttctgcagaatgagaggtttgcagctcagaataagtgataggatatgatgttaaaatggtgatcatgggaaatttgagaggaaatcatacttttaaaccatctgctatgtgcaaaggactgtttaaggaatttaaatttttttatttcatttaatcctcacaatagctatgatataggttttagaatctcccaaatcccattttacatatgagaaactagggcttagggtttaaaatttaagaagaacattgaatgtgttaaattcctgacaaatagcatgagagatattaaaatactcattcttttcccttgacttcagtagtgctcaagatcacatagttattaaatgacagagccgggattcaaacccaggtccttgattccaaagcccctcccagaagacattcagcatgtcgagtagaagatgacagttacaggcctgggtgcctagaaaagcatggcaatgattaaaataaggtgctttttttcttacttattggaaaatgaattactgaatatctactgtgtatcaggaattgcctgggctagggaggcagagatgaagaaggccattgctgcttaacggggagcttgcagttggacagggaggtgaggacagtgcacaccatacgatgtgacaaaagaaaagtgtgtgtaacaagagcttctggaggggaagaaaaattccagtttggatggtaaaagatggttattggtacaatattttcttgctacaatattttcttgctacaaaagtatgagttaattttgtgcaatttacagtgaattttgtgaatattaagggtgttttcatctatgagaatttttcatttgtaatttcatgcttaagtggatcagcattcttatcttaagggtttggcatttaacacccaggggctttcaaaatgtctttttctagaagtgcttgaattgaaatgattccatggatcctactatctttttcttttccttattcttcattatggtcagtactttctgaatgcttattgggtgcaaagcacagataacattcaggactttatagacagaatataagtaagatgtggcccttgcattccctgagttttcagtcctaaagagaaatggcaggctgtacttttgccacaagccaaataccccatctctattggtaatacctccctgtggtttagcagcgaccctgacggttttggagggagtctggcacccagcctctttagttggaccagttggaggatgaggttatgcttggagccatggaagtgatattcagatctcagagtgttaagagaggactgggtcttaggtgctggtaaggggaaagaaaaaggtaaccgtgttaccttttctggagcatccactttgtgctaaggttttatatacattctctcatgtaatacttcccatattccagggaatagggtgggagggagtaggagcaagggaagggcagttggcaaacgggagccagcagaaccctgcacacggcatccttgaagggtggtgtcggcctgaggcgccacggccagttctgtgatgctggatatctcagtacaccctgggcatttctgcaggcatgttggttgcctccactaattcatctttcatgctacctggttactgagttgttttgaaccattcggcagaatttatacataagtgtgtcctttgctcattctgcctgcatttgttgacagcccttttttcctttcttcttgttttcttctgccactgcaaactggggttttagcctcaagccctatcctgttcctgtagggtgtgtttcagatgccagcttatttcagagttccctgtgagccagcgggtgcatagaagctaggttgttgtctgcattctgatcttgcatccagcaagccacacacatttgaagaaagaatagagagttgtttggatctggctgattgagcaacgcaggctttataattgtgtcaagctaggtcttgtcagactgcatcgacttaagtaatattccatgtcaggcccacaggtttatggcattgaagcctctttgtttcagtctcagtcatcctaaacagacttcatttcccaatagaaaagctttagatgtgaatgaaccccaaatacctgaaaacatccattttctgcctgcatggctactggtcccagaaccgttacaatgctagtgcagccatgcatccttttaagtccatctctgaacagtattgtttggttataactgtatggagaattagggagcttgatatatgtccctttgcaatgccttctaagtcttaatagccaaaactgggtggtaaatattatttccttttccctttactatgtgaatgatacttagacaaaacttatataactatcttaactatgcagacatttacttcagcccagagtgtctgtgatcttgactatgagaatcttgtctcttgagctttcttttttagcttgaatatctttctatatttcgaaaagatggaccagaaatatttaagttactacttaagtcaacacaggatgaaaagtttttaacttctttaaaggattaatgagggtgccctccaggccaatcccagtgtgctcaggaattacctctcttgttggggatgtgacatgctcttggccagaacagagctcagccggatgtcactgtgctcactcagcctgtggggtgagaggccgaggattgcttcctgtgggctgagtaagccttcctgtgttgtcagcgactgccagactagctgctgccaggcagtaccagcttgcccatcaggcgctcttgttgcctaactgagacactctgtgctttcaggaacgagagtaccctgatgtccagacagcctcccgttgctgtctaaatatttgtcttggatatgcttgtaagcaccactgggttcccagcactctgagtgggccttcctggagtggggagcctgtgtcgatggagcagtgggtggggaatttggagatggaagccaggcccttgactcagaactgctctgtacttgaatggaactgagctatgcagtatggcctggtggaaagaatgtgatcatgggcattagcctccaacagaccttgagtgtgaatacccgctctcctgtttattgcctgaccttgaatacaacagttgatctccctaagcctcggttgctttgtctgtgaatcagggaagaacactaatacctactttgcaatgtcgctttgagaattaaatgacaagctagcatatagaagcacctcaataaattaatattaattgtaacaaccaccaccaccataaccttcatgcagaaataattacagtttaggatttgaatcctggctgtcaccgttaggtaatatttcctagctataataaaacagcttacacttgttgaggactcattttgtgttagatatgctaaatgggttctctcttaatcttcacaacaaccccatgaggtagatactgttatcacccccattttacagatgtggaaactgagcaccagagaggctaaattacacacccaaggtgatactgcaagaaataagggagggaggcttaataaaaatgcagagctttttgattcttatgctggtagtcttaattaatacctcaggtgcttcaggagtaaataaagtaagcctcaaattaaataataaatgtgaagtgtcctgtacatggatatacacaatacatagtggaggtcttccacccgagtggcttttaatctaaaatctgaaagtggcttgcacccttagatatatgagagagcttagtaaaagtaagagtgactggaggagatcctgctgggcttggcagctctgaagctcccatcgcactctctgtcttgttctctcaatctgacatggtttcctgtgtcttttgctctaagcagcagacctgcttggactgtaagaaaaatttttgcatgacctgttcgagccaagtagggaatgggccccgcctctgccttctctgccaacggtttcgagctacagcctttcagcgagaggagctcatgaagatgaaggtgaaggacttgagggactatctcagcctccatgacatctctaccgaaatgtgccgggagaaagaagagctggtgctcttggtccttggccagcagcctgtaatctcccaggaggacaggactcgtgcctccaccttgtccccagactttcctgagcagcaggccttcctgacccagcctcactccagcatggttccacctacctcacccaacctcccctcttcatctgcacaagccacctctgttcccccagcccaggttcaggagaatcagcaggtaagggcccatttgtagtctctgccagtctgtgccagtttgagggctcattttcattttcctctcctgcctttgttgtgagaatggggtataaggctaagtgtcttgattatgtgaagcctttctgactactggtgcaccaagtgttttctgggtatcagactcatgttttggctttcttcagaggtgatatgcacagtaccaatttttttgtttgttttttgtttttaatacacacatatcctagttagacattttttaaagttcatcattccagaaatattttgagaaaagtaaccattaagccatcaaatttagttctgttccaatttgtctttcaacttaactcctttgttgcagtcttcattggctggattggaaacttagttccttagtaaccatcacaaggaatataggaaagcaaagggctatatggaggcaagggagggtggggaaacagacaaagacactgcttctcttaccagtcactggctggaagcaggagtagttggcacgctgtacttgcatgctgcttcttcattatcctggggggcttggaagtggtaagctaagagcagcacatcaactgaatcatgacccaggtctggggagtatagaaatgagtaataaactgtctctgtcctcaaaaagcccccagaagagggaaggtagacaggtagaccaactaactactggattagagtgaggccagtggacataattgttgtataagaagtgatgatgttgcataagtgccttaagtgactctgttatttatagcagcggcccctaacctttttggcaccaaggactcgttttgtggaagacaatttttccacagactggggtgcgttggttttgggatgaaactattctacccagatcatcaggcattagttagattttcataaggagcatgcatcctagatccctcgcatgcgcagttcacaacagagttcacattcctatgagaatctaatgccaccgctgatctgacaggaggcaaagctcaggcagtaatgcttacttgccagccactcacctcctgctgtgcatccgggttcccaacaagccatggaccagtaccagtctgtggcccaggggttggggacccttgatctatagggcttgggcaatatgggggaattaggaactacaagatccaatttccacatccacttttgtcactgacttcttgatccccttgggcaaatgttgagcctacaacaatgaaatgaggttagtaatcacagaccacttttgatcttgccaggatgttgagagacctgaatgcgtgataccatgtctaaaagagctctgagttacttagagctggtatagtgctagtgctgttggttcccacacatgatgtggatggctgctgccacttgtttatgatcacctcctttgccaggactgggccccctgattcagctcttgacaaccactgaggcataaaggccaatgtgatagcataatttaactgcagtaaaatcatttaactccctttttggcctgaacatgtttttctccgcagctggactttaattctttcctaagctctgactcttggtctgctagacagatttaaactcctgctatatattcttccctttgcttgtgttttttttttttccactctatgtataaggagccaggagaagaacttgaggaattctttttctgtaaagaaccttggctgggcgtggtggttcatgcctggtaatcccagcactttgggaggctgaggcaggcggatcatttgagcccaggcatttgagactagcctggcaacatggcaaaaacctgtctctacaaaaaatacaaaaattagctgggcgtggtggtgggtgcctgtagctactcaagaggctgaggtgggaggatcatttaagcctgggaggtcgaggctgcagtgaaccatgatcatgccaccacactccagcctgggcaacagagtgagatcctgtctcagaaaacaaaaacaaaaaaccaagcaaacttttcaggtagatttttcaatgaaagatgataagcttcctgtcattaaccagaaatttccagattgcacctaaaggtcaccctacatacaagatctaagtgggtacttttcctctgagattttcaagagaccttagtgtctgcttacatcccctgttctggtgagagctgcactttgcaagcaggaaaaacaggcatggaagaattaagtaacttacgcagtactgtctgacaagttcataagtgagctgcacctagaatgtaaatttccttataatacttgctcaaccagagttctctctttcacctttagtgccctagcaatcaatagttgctaggcaaggaagtatatacaataagcacaactgtggacaggtactagttttggatttttatttagccagtgggcaaactggaaagacaagagcatgctttgcagcatgaggtcgtttctctttctaggaaacaggacatctgaaagatagctacttaggaacaggttaggctctgaaggattccagggtaattccaaggtaacactacctgagagaccagtgaggatctacagtaagctaagagaaaacgttgttgatgaagacattgatttggatccatccccatacatgtgtactatgcatttgatcttgccttgatttggcattttgttacttctgcttttcatttccattgcagttggttgcctcttcttgattagctccatattatgaatcctaatgtggggtgagtggctggggtcggtgggtgtctttggtttcccagattgtcccttcactggcatccccagaatctggtggaaaaggcctgtgagctcagacacctctttgctctgagctcacagcaggccctttgcctgcagggagcagtgggcgaagaggatctacttaaggggtttgtggcttaaatggtgatggaattaggaggctaacagttctgcctactctttggccaaacctcctaaaagagtactcaggaggaaccttttgagaagtgagaattctaagcataatgaaattccgtaagcataggcagtgttttatatagtgttaggctaatagattcttagatacattaaaatactctttgactaggtctggacatagcacttaataatagtgtgctcaacatggggagcacatttccagaatgtgagagtagttactaggcagaaaagaaagagactagggtggtgatgatctggaaactttgtcccatcagtgtcagataaggaagccagggagatttagtgtgaaggaggggaaaacatggtataaacagtttgggaaaaacaaaaaacaaacaaacaaaaaccccaggagactatggtctgaggagcagaaccagggatagggatggcaattttggatcagtgtcaagaaaaaccttgatgccagatagagagcagtccagcagtggaatggacacaatgaccttcccttcacctgtggtgctcaagctgagattaaattgatgatgagttgtggctactgccatcctggtgtgtgcagaattaatgcagttttgttctagagggcagctttgtctattgaaatgtatttttgttgtttctctgcttgacaaagttggtatgagagagcaggcttttgtaatgatgctgtaagaggctccggatttctgggcatgatgggagtacattctggacattgtgtgagttgaaaagaggcccatgctatgcagatctctgggacatctctagatgtgatgttacttttctcttcccacaggccaatggccatgtgtctcaggatcaagaggaacccgtctacctggagagcgtggccagagtacctgctgaggatgagacccaggtggggcctctgcttgggtctgtgtcttcacctttcctctttcactggtgttcttcggaacctcttagcagagtcgagtggagagagaataaatgtgtgatgatagtgcttccgaaattatatttttggggtagggtttagtgttagtgttccaggttaactagtgaagcggtcagtgtatttataaggagttgtgaggtcacagtggagacggagaagcctcatggcccattgtatttccagtctcttgactttctaagagctgccggagggcaggcttgtggtcctgctgttaaagtcttgttctttccttgcttctagcacactgtagccattgtcaagggaaggaggtcagacaattagccaggcagggccagtccagagcacagaccagggagctgtggccaaggttgtgtatagaggagtacttgccagggaaatgtgcctcttgtgggcaagcagaagtctccaggggagaagggccagcaccatgctgggtttcatgtgcggccatatttaacctctacaggacccctgtggggtaggactgctctctccccttaatggaggggcaaacgggctcagagtggtaagcaacttgctggatattatttagcattaacagcagaggagtcaagattcaaaattagggtcatatgactcaaaccagcactccttctactatacttctatctagtactatatcacactgattggttggtctgtgtctgtttgctcctgagcacagaatcgtgggtcaggaagagattctagtatattttgcaatgcagagcaccatgccaggtactcatcctgtctctgttcctacccttcatgaggtcagtcaccaaaattatgatgtggtgactgctttggggtccttggagaaagagcttggggaggtaagagctgagcacactgatctcatctttgtcattgcagtctattgactcagaggacagctttgtcccaggccgaagggcctctctgtctgacctgactgacctggaggacattgaaggcctgacagtgcggcagctgaaagagatcttggctcgcaactttgtcaactacaagggctgctgtgagaagtgggagctgatggagagagtgacccggctatacaaggatcagaaaggactccagcacctgggtgaggggctatctgcatggtagctttacagagctcaggagtgtttgctgtcactccaaagcatgatggtattgacctgactcaatttccacacttaagccatggaaggagacaccttacatatttgcaccgtctaataatagctgtcatttgtggttgagtgtcaaaactagattaggcattgcatgtatgtatttattccttagagcaacctatgaaatagacattattagcatcacccctttatctgaaaggtaaaatttaactgaaaattttatggtctaagtccatagcctttctcaccatatgctatcccctccctactcaccaccaccttgtaagttttcttaccttagaataagaatgcttgttctgaagatttgggaggtagaaagtgaatctacatacatggcaggagaagatagctgttccatctgcacttgggctcttccttttgttcatttcccagagcattttacactgtatcattcaggagatgcccaggaaaatatctgggtctgtggttaaatgagtttagggaaaaatacctcatatcttcattactgatttatggtagatttttatattaaaggcagagaagtcctgcagaagagaaatgtgttttggctgttttgaacttagcatttcctgaaattatttcaccacagaatcttctcctttcctcccatccccagttgatttggttcctacagagcaacatactgattccttgcttggtaagagtggttgaagtcaggtttcaggctctcttctaccagtagctcaaattcatcagtgttaggggtcatctgactgactcttcacccgattacagactgaggcctactgacatggagtctgttttccctttgggattgtttcaagagtcttctctccagtcgtcaggacctggggaacagaacagatgactccacgtgggaactttatccagattctctgactgactgaaacagctagatagttcattctttcttgactttaatgctgacttcaaaatagaaaaggatattgcacatatacagtatccttctacttggcagtttgtgcaaactggtggaataccttttcctaagagtagaccaggctgggtgtgttggcttatgcctgtaatcccagcactctgggaggctgaggcaggtggatcacttgagatcaggagttcaagaccagcataggcaacatggtgaaacaccatctccaccaaaaacaaaaaattagccgggagtggtggcatgtgcctgtagtccccaggtactcaggaggccgaggcaggagaatcgcttgaacccatgagaaagaggttgcagtgagccaagatcatgccactgcactccagcctgggcaagagagtgaggctccatctcaaaaaaataaaaaataaaagtagaccagatgcacgagtaggagctttgtgtgagttctgagcatgtagagcgagtagagggcagatgtccatctaggctcttggcaagcctggttcccagcagggagtggtaagagttcagaaatgatgtcagggcagtaagagactgtatttgtaccatcatgccttacctattcagacatccttctctttccttttcagtcagtggtgccgaagaccaaaacggtatgtagttgtttctgtttgggaatgggcttaggcccttttgtccttcccctccttcaaccccaatccctttagtaatctaagaattctgagcatttgagcccccagagagagggtgtgtgggaaactcactgagacccagggggcctctcaccatctttagaaattctctctgctcgctgtgcaggaagcagagtggagcatacgtaggggcggactgactgatgtgcatgtccctgggctacctgagctcataagccaacatttgtaaaacactgaaacagaggaggggtggcatgtatcacactcagctcattttttaaaatcttggtgttttcagttctggtctgggtagggagggtctctgtgtacaccttctggggaatcagggtgtttagcagcttctggtactaaccaaaaagaaagggtggtgacctgagacagccctgtttgtacagggctggtaatggttagagctactctggagctaacacatgtgctactctctgggcacaagctatatatctcagctcagctgccactcacttaaagaccaccactgggccctcaggtactcccagaacacactgcagaactcctgaccatctgtggggacattctaaaatatgctatgtgttttcaaaagcctcaagggtatatggttgtgaactcccttccaagagagaacgttctaagagtagtgttggactagcctgcagcattttaaaacttatttcagaagatttcccaaatttatttagtaaaatggccttttgctcagaatgggcaattttatgtctgattacttctaatcagacataaaaaacagttgagcttttctcaattccccaaaaccatttggagttctagacccacctccaccctccaaccccccagcatcaccggtaccaagatcaggctgatctacttggtgcttcctttctttttctgattccctgggagaatgctgacaactgagttaatgtgtttgttgttacttctgagagaatgagtaactgaaaattataaattattcccattcatcttaggtatttgtatagtctccaaacctctgttaggaccaacagcacctcaaaagaggcaaatgggtttcactccctttcacacccagcctacctcctagggggaagtatttcttgactttttaatagtccagaaaagagaaagtatagatgcaataagggagaattcctctatgggttggccaacccccagatggtagaggtgacttctgtgagatcagttcctttttatgggtacctacttcaggctacaatttaagacatattggagatggctgggcttttgaacattattttttctgtttgggtcagctctactaggatactggtcatgcccactatattctgctagtgacacaagccagttagcatttattgagaaccctgtgcactcagcagttgatactgtctggatagtttctactcttagggcagttaggcagaaggccattctagagcaggagctgtggggccagcctgcctgggtttgaatcctggctcctcgacttagcagctttgtgcccttgggcaagccacttaacttttttgccccagttggcctcatctataaaatgaaaataacaagaggtcctactttatagtttttgtgaggcttcagtgagttaacacatgcaaagctttcaggaccctgcctggcacacggtaagcattcagtaaatgtgggatgttgtcattcccttgggaagatgttcattcatcagacatttagagtacctaccatataactggcattgggggcttcaaagatgaatatctaaccttggagcatggaataaatgctaagcatataattgtaaaaattgattgaatatgttgaattaaagagctcatagtctactctgggagtaagtaggcaaactcaaaattttaatccaatgtgataagcagtcatgggggtataaaaaagttttgtgggggtagaaagagggagcagtaatctctgccaagtttctccaccaggaagtttcctcaggaaacctgggagtagtttgtgagatagcagaggggtcccccatgatccctgactttattaaatggaggatatgtttatagataaagccttgtgatccttaatgaaccattcatcacagttccatttctatctaaacttttctgaaccagttttatctttttagcctgttctgcctcaggggataatgagtccctacgtgccactcacacactcactatattacagccccaacagtctgaaaattatttcttttaagctttgagaactttgccttagttctcatgttctgggatgtgtctgatccacaagtgctgtgtacttttcaaatctttacctgttggaggggatgaagtgtggattaaacaagtaaccagagttggttattgaggaaatgtttcctcggaggagctctatttgagggaagcatgtgcactgagactttgtttacaatgtacctgttatctcccacctccctcccccagtcacccctatacacttaagacattctcctcactcctctgcccctttttttctgccctgtgtgtttgtacagggggagcagtaccatcaggcttggaggagaacctgtgtaagatctgcatggactcacccattgactgtgttcttctggagtgtggccacatggtaacctgtaccaagtgtggcaagcgcatgaatgaatgtcccatctgccggcagtatgtaatccgagctgtgcatgtcttccggtcctgagagcttgcatcggtttcttcagtgccttacagggaaatagcctggggtgtctgggctcagggttggccagcttgcagaggagcaagctagtagaaatattgcagggttcccaaaaccaggtcaagcaagatgccatgtcacccctgagcatgcctgtcttcccaggggtgtacctcttggctggcaaagcccaaggccagtgggaacttgtataaatcacatgggtatgttcttggttcagtgatcttggagtgatgatggtaactgatgaacagagaactttccagaacttgggtcctgtcttcctccctgaacctagacagtttcacccctcctcctgtacccaacccatccccaccccatatgggagatgcttgcccatgtgtttcatcaatcagaagtcctcctccccagcacattcggatttaaatttctggtctctccggctttctgtgctttaactatctttgctaaagtctcttgctacattgcctaaatccatttgtttctttggaccaaaaatgttagtttaccagaccgatagtggtccttaggacagattttagaccagtaaacttatctttggtgagaaatgaaatacaaatgctatagaaaaatttcaaagttgttaaaagccacttcattaaatgctgggattggaagctgttggtctcctgacctgactctgggagccaacaaaacatcaggctcccaaactgctgggaaatttgtttctgtctgcaagggatagtgcgtgcataatccctgctgctgcttctcttgggacctgatttgcaccatccttagtttatgcggaaaggggaagcaatgggtggaggcagtggccttctccttaattttggcttggcttctgatccttttcccaactagaagtcttaagccacttttcgctgaaaatgaaatccctcccttatccatggtagttttaaatttggtttcattgaagaaatagatttaggcaaagagcctgtgctcttctctggccagactgctgttgaagttcctggagagcaaatgttaagacagagcacttaagagctttcaggaggtactgaatgagactggattctgttgtaagccgacagttcaagtctttatttcccaggttggtggggagtgaggagaccctactttcattccctttcctagcccactgatttttgggggcaggtcagggagaaagcattttttttttttttttgagtctcactctgttgcccaggctggagtgcagtggtacagtcttggcttactgcaacctccacctcccaggttcaagctattctcctgccttagcctccagagtagctgggattataggcgcccaccaccacaccaggctaatttttgtatttttagtagagacggggttttaccatgttcaccaggctggtcttgaactcttgaccttatgatccgcccgcctcagcttcccaaagtgctgggattacaggcgtgagccaccacacccagcaggagaaaccattttctaggctctttaggaaggaccatgcaatgagtaggtgatgtatttgagccctcacagtctttacacccctagaggagctggaggacttaagagtttgctgcagaagcgtggccaagcacaaaacacatgatcaggaaagcagagtgttttcccattaccaatggatgaactatgcaaaccctaaacgccttggcagacacctcccaccccttacccctcccatgcagctgaaaaatctgagactagaaccaatcatgactctggatggcagagggaaacctctaaagggacttattacattggtacagacatatttatgctttcttccatcaccaaccactaaacccctttggaggaatgaaataactgcataaactagtcaactgaacactgggccacttacctcaatgttatacaaagtcctggatgatttgattctgaaccacagcctttgcaggagttgggggaatcagatttgctcatgaagacatccctttccacttttgtcatgggcagtaaatactatagtttacaatgcctaccaattagcaaaggatcattcattcagctactcagttcctctgtaaaacaggtctatgtatgtgcaattcagctaagatctagcagtaacttaagggcagaagctggctctctacttacaacctgctttctctgctgaagccttacctcctcttcagtttccctcctagacacaaatcgaaaataatatactgatagctggttagtaacctcagtaagaattaaaactgaggttgtttactcattttgcctttaaatcttttatccccttttggtgaaggtttccctttaggaaaaaaggtgtcaaacaaccctgattttttttttttttgcatcatttttattacaccaaattaaagttgggagttccaagatcccattccagttaatatttaaccaaggtctaaaatttgattttttttaaatctttgaatcctcccttctgcccctcatggatccttggttttaatgatatggaaacatctaattcttagaattattccgtagcttttgctgattactctgagatttcagttaagacttgtttcaaaagacagatagctgactggttcataatacattggaatagttggatccaaactaataagaataagctgtacaggaactagtgctcaatatacattgtataaatttgtggaaatctcttggatgtgaattgttacttcaagtggcttttattaagattttctcagacttacttggaggttaaagcaaacccaaatgtgtattattttgttacagagctctgctttataattttgtaataaagtttcaatacagacacctgtcctgtctggtgcgaggatgttagaggttgataggactgacaaaagagcctgacagtggttcatgctataatttccacactttaggaggccaaggtgggaagactgcttgagctcaggagtttgagaccaacctgggcaatgtagtgagaccttgtctctacttaaaaaaacaaacaagggccgggtgcggtggctcacgcctgtaatcccagcactttgggaggctgaggcgggcagatcacgaggtcaggagatcgagaccaccctggctaacacggtgaaaccccgtctctactaaaaatacaaaaaattagccaggcgtggtggcgggtgcctgtagtcccagctactcgggaggctgaggcaggagaatggtgtgaacccgggaggcggagcttgcagtgagccaagattgcgccactgcagtccggcctgggcgaaagagcgagactctgtctcaaaaaacaaaacaaaaaaaaacacaaacaaaaaacccaaaaaaaccaaaaaattagccgtgcatggtggtgcatgtgggtagtcccaactacttggaaggctgaggtgggaggatcacttgagccaggagattgaagctgcagtgagctctgatcgccaccgcactccagccagggtgacagagtgagaccctgtattaaaaaaaaaaaaaaattgacaactgataaaccacaagctaatcctgggatgtgcacatggcctgggattagcctgtggttgggccaagtgaccttggtcaagatgctcagtgttgttgtaactaactaacttgctcaagaccacaaatgtaatatatggaagaggccatggaacaacctagaagagaatgagagctgggtaggtaaaggatgaatcccaagaccaattgggttgaagcaccaagtgagttcagatatttacactgatctagaagagatgggccttaaagaactgaaatctgaggacagttagtatgcccagttaggtcttcaggttaccctgggagatacatggtaccttttggatacagctgtagtacagctggactatggctcagaaaaggttggcccaggctgggcgccatggctcacgcctgtaatcccagcactttgggaggctgaggtgcgtggatgactcgaggccaggagtttgagaccagtctggacaacatggcgaaacgtggtctctactaaaaatacaaaaacttagctgcgagtgatggtgtgtgcctgtttgttaagtcttagccacttgggaggctgaggcatgagaattgcttgtgaacccgggaagcagaggttgcagtgagctgagattgcaccactgcactccagcctgaatgacagagcaagagtctgtttaaaaaaaaaaaaaaggttggcccagcctcgtgacagactgctgtgtgtgcgcaggcttgtacaaacctccctgaccaggcgcccaaggagcagggaaaagactactgagaatgcagcccctgggagaacaagattatgtgtccatctgctgtgactgagaagagaaaggaatcttgccaaaagggcataaaggatcgaggatgagccacaacactttgctcacattgccctagggagctgacctgttcagcacccagtgatgacctctgcttgatgccagccagcagcatgtagaggttcagaagagggaggcctccagcattctgctggagagatttatgatgatgatgttgagggctgcattgaaatacatgaaagaaatacatgaaaggatacaaaatagtatatacagtcagatctcagcagcaaagactggaagaaaatacataaaaaaccactgacattgaaatggcaataacacacactaaggcagagaagggacaagatgatcacctgcagccagcagaggccctttcctgtgagtgtgcactctgggtgtaagcaaccaataagggcaagtggggctgggtccaggttggagaggacagtgcctttggcaggatcctgaggagacagccttgttctgctgccctgtccggttgtttgtttggcctgaggctgaagagagaaatggaaatctatgtaggtcagtactcaaaggaggagcagctttttgtctccatagaggatggaataaaaagtatcttattcctaatactgaagcaaggctgaatggtgcctattcaaaaacaccaaatgtcctgggctagagtcaggaaagtaaacccctcccccgtgctgtccctactcccccaacatacacattttaaacagtaggtggaagccaaagtcaatcagatcaaagttgggggggggcggtggggtggccagggggcgcagtggtccttgatcttataggtccagagcctgttaatttgttcataaggtgagaactgaccctcaagagctggaaggattgggacatggcagccagtttacaaccatatggtgtcctgatgagcctgcactcagagtggagtgttggctggaacatgcacacctgcaactgagggttctaaagtcataggttaggcccttctcccgggtagggtctggacatgcacaccaggagtgacgttcccaactctagataactatgtgctaggctctgggctaagtgctttacataatgttgctcaggacaacaggacaaccctatgatttaggtgcacccattctacttggagggattgaggcttagatgttaacgtaacttgcctaaggttagagccattaagtttcaggagtctgatctgaactccgtctacacctgcactgtccagtgtggtagtcactagtgacatgtgaccatttgaagttgaattaaaataagaacttcagttccttagttgtgccagcttcatttcaattgctcagcagctgtctgtggctagtttggttggatactgcagatttatggatatttccactgctgcaaaaagttctattgaatagcacttgtctacactaaattgtctctcttccttttgttcttcaaataaatcagcctcaggtagcacaggagctgttctttgtaagcaggttgtatggatctgttctcaggtgtggatttttatttttttccctgcagatatggagtatattttctttaagaaattaaaaactaagaagaaaatgccactcaacattgttggtattatcaataggtcagcaggaaaaaaaaaaatactgtgataaacttgtctctctgataccaagaagaaattctagtccgagcttcaatatgcttcctgtttttttcgctaggtatttcttttactgctgctcttcattctttcccacatttcatattggaggattggtacagcctttagaacttcattgacaggagcaaatccagtatccactgatttcttcttaaaggcgctctaacccatcagatagcccggcagtttcattcacatgaatactccagccatgaaaaaactcagtaggacacagacgaatccaatgaatagaagaaaaaaaatcgattgagttttgggatatttggtgcattcgactggtccagcattatgaaacctaaacctcccattgtaaacaggaagctggatgcaaatccttccataatatactgtccatttactttgtaggccaagaaagctactggcctctgatgcccacgttcatcagccaatacttgggggttcaacaatatcatataattattcctccagtcatgaggaagtaagacaccaccaccagagcatacacagtcatggctgatggcatgtgcagccagggtggcttcttcaacttcaggttggaacactcgagcactaagaatgggatatggtacaaagtctccatgttggtggcaacaagggctgttcttggcctcaagccccatgtggatttttattcttaaagaacagtcttgtttccaggttttggggatgcagatcttcctggagccctctatccctccagaggagtggcccaaataacctcccctttcttcataaaggccccattttcctacctgaccctagtcccctcccttcaaactggggatcctcaccatgtaataggagaacacagagaagaaagtaaaaaaattcattttgttttctttcacatgaggtttgttcctggcaaagcgtgtcaggctgaatacaagttccgctaaacagaagcatttccgagggcagtcctttaaatacaactttaaaatgagcctggaagtacaaaggaacaggcaaggatgggagagaaggctttgtggacagagctgccatagcccagcctttactccttaatctctagggaaattattgggggtgtaggtggggaaaggacaaagataactgcaagatattttatttataaaaagggtaactaagctgcttttcaaagaaaacaaaaagatggcaaacccagcacccagctctgaaagatctatttaaaccagcaagacaaactgacttcagctgtggcacccacagcaactaattcctggtccagaagagacagtggagaactggtgggtttgggagaagcaagcccattccccctatactgtgtctatctgcctccagcctgagtccagtccagtagtatggtaaaggagagtatggcctgagggagagggaagacagcaaacctagcagggagctaccagtctccgtttccggatacatgcccaaatccactctggggagacctgctgggccgcagggttcttgtccctgctacccagcacgtgcgtggctgaagtcatatcaaattcctgtaccaggtccccgtcgaatgccacaaagtagcgtctgagacggctgaagtctggtgtggagggtggcaagtaaagccgcaccccagtgaagatgtccagcaatacctgcaaatgcagaggggtcagggtggggtcagacctacactgggtacagatgggtcttcacccaaatgagcacgggacagaatgagggagcctagagttaggacacaagcagagaagtttactggaataccatgcatcaatacccccacccctccagtcactccaaattatacaggactgacacgcccctccatccctgcctaggggaaaaggagagtggacaggcctcgacatctgggacctggagatgggaagagtacatgtgtataagagccacccagtcatggtgggcaggcggagctggctctgactcagtgcccccagactcagtgatgtcccctgagaccaagcagtctactctgtacaacctgctagactgaggggtcaggagtcctgcttactactctcaatgggttcaaggacttcaggctgggaagagagaggggaaaggtttctacaggtctgttggggaccgagttcaggccttgtgctgtgagacttctatgcttactcctggatggcggtggggagcgtgggggcgcaatgacatgggtgtcaatcatatgtttacttctctatctgtcctttgaggcatcagctcccccagagttgagccagtactaaacctagttcttggcatcagaaagtgctcaaaagaggccgggtatggtggctcaggcctgtaatcccagcactttgggagaccaaggcaggcggatcacttgaggtcaggactttgggaccagcctgaccaacatggtgaaatcccgtctctactaaaaatacaaaaattagccgggcatggtggcacatgcctatactcccagctactcgggaggctgaagccggagaatcgcttgaacctgggaggcggaggttgcagtgagcggaggttgcagtgcgctgtgattgcaccacttcactccagcctaggcaacagagcgagacttatctcaaaaaaaaaaagaattgctcaggagatgttgccaaacccaagactgacaagaaaatgtaacagggaaaaggctcctcaggtgggaggagagtcaccaagccagtgccctctccccgactcgctgcttgctggacctgcttccaccctgaccacaaactcaatgctgcattcccacacccagactggtcttttccctttaatgtaaattttgacttggggccagcagctgagtgagtccctgcagtctctcctggctaggccgggctgttctatctcctgcctgctggcacagttcttcctctctgctcactggctggccgcctctgcaaggcaacaagaggacatagggtgagcagcagcattgctgaccctgcccacgacagaggagtggctgcaggcagggaagaggtttagccgatgttccccaaacacctttgctcatcctctttcaaacttcttgtacagaaggttgggaacacaacctgggctaaactggcccacgtggtgtgttgctgtttttaccctcacctttgtttggcacagcgtctcatcagcagctttccgcttctcccctactttcactggagaagactttgtggccagcttctcccccaccttcatagcggaaggctttgcagtctgcatgttgcctgcaggacagagaggaagctgggtgtggtggtgcacacctatagtcccagctactcgggaggatcaattcaactcaggagttcgaggctgcagtgagctatggtcgtgccactgcactccagcctggatgacagagtgagaccctgtctctaaaaaacatatgatacaaaagaactaagagggtagggattgctgataatgctccctgaagtcaggggcagtaatgggaaggaccaggggctttctctgctatgagcataggtgagaggggagtgaagagttatcagctaagccctttactcaaaggtagcttattccctggtcagactggctgtccccagggtactgctccattcaggtttgctgagcagatacagggtgcccagcagaagggtctctggcccatggctggacacacaccaggaatgtagtctgtgtccactgcagtggacacagataatcatgagatctcagggctggaatgtgagactgggtccctgcccttggatctctgcccctcacaccgccctcttcaccataccagccccctccctatccttaccatctttgctgttggagttactcagcttcccttctgctttcttggtactggctgagggcttgctgggggccttgcgggacacagcagaccctgagggacccttattctcttcactgctaccccctgtagtggagctcccctcatctccagccactacagtgaagtctgccttctccttggacaactggtacagttcctgaggcggggagggacaatgtcagagggtttcattgccttcccagtctggcctcagaggtggtgtgtgtggtgtattttaggcgcatatgggaacaaagatgtgagaaagataaagagcaaggaaaaggagttggctcccttggcaccattccaaagtatggccctatagcctgagtaatcagggtacaaatcattgttctctgtacagcaaagcaggctttgctggggcaacaggagcaaactcttattccccagactaaaggctgctcagtggggccttgcaaatgcaaggttctctactcagagatggagggagaaggaggtctagtgctgtgcccctggcccagcagcagtttgtctccctctctaattgccctccttgctctgcctcaggagaatgggggaaaggagaagacagaggacatgtgaatggtctagatgcccaaggctccaaggcctggacagtggggtggagaatacatatacagcctaagagctgctaccttgagttggggaaggttagtggcagatttccagtccttatcatctcggattcgggtgcagcgagggaatcggatggagatcccgtcagctgtatgagcctccgatttggagaattcagcccctgtgatctcccacacggcagctttctgtcaggagtaagccagcaggtcatcactggttaagaagatagtatcagtggccgggcgtggtggctcaagcctgtaatcccagcacttaggaaggctgaggtgggcagattacttgaggtcaggagtttgagaccagcctggccaacatgacgcaaccccgtctctacaaaaaataacaaaaattagccaggcacggtggtgcacgcctgtagtcccagctactcagaaggctgaggtatgagaatcgcttgaacccaggaggcagaggttgcagtgagctgagatcatgccactgctctccagaacgagactgtctcaaaaaaagggagaagcaagtattggccaggcgcggtggcttgcatctgtaatcccagcactttgggaggccaaggcaggtggatcacctgaggtcaggagtttgagaccagcctggccaacatggtaaaaccctatctctactaaaaatgcaaaaattagctgggggtggtggcacccctgtaatcccagctacttgggagactgaggtgagagaactgcttgaacccaggaggcggaggctgcagtgagatgagatcatgccactgcactccagcctggacaacagagtgagaccctgtctcaaaaaaaaaaaaaaaaaaaaaaaaagtatctcccaaccagctagaagcaatacagaacaattaaaaccaaaaaggcggctgggtgcagtggctcacgcctgtaatcccagcaccctgggagactgaggcgggcaggtcacctgaggtcaagagttcaagaccagcctgaccaacatggagaaaccacatctctactaaaaatacaaaattagctggccacggtggcacatgcctgtaatcccagctacctgggaggctgaagcaggagaatcacttgaacccgggaggcggaggttgtggtgagctgagatcccgctattgcactccagcctgggcaacaagagtgaaactccgtctcaaaaacaaaacaaaacaaaaaccaaaaaagctttggctaacagctgggaaacttgggtcctagttctgctgctgctgttgctgaataaccttagggaagtcctgtttgttctctagatctctttcttggtcggtacaagaagggattgggccagattacttctagaacacaccctttgtgctgaggggataggtactctcttcttctctctctttttttaaagcaattgtattgcagaaagaattctattcaaaattcctcagagttgtctggttgtccctgtgcctatcactcagctggaaatccagacccctatccctgggtggactttcagcgaggtgagatggattctctatggcactagagaacctgcaagctaattctatgagctggaggcccccaagccactgggttgatacctttgggtctgggacgatgaagtcaggatagtagatcttgttgaccttcaaccagctgggtattttgctggggtcctagaggagaaaagatgctactttgggctgttcccaacctggaacaaggcttaaatcccttctcttggtaatgagattataagaagccacttaaacagctgatgtttgagccatgtgatcctcccagcccagagtgggtatgacctagaggcatgcaagccattttccacaagaaggcattcagagattataaggcctaatcctgctcccctgagcaagctgcaacccttctttctggggagacagaaatacctgtagtccccaaagcacagcctctgtctcagtgatggcggccagtccagaggccatggccaaccaggtcccttcctcaccttgctgatcttcaccatgtctagttcattctgcaggcgggcaagcgtggcatcatcatggcctcctgcacacttggtgactgtgcaccacttctggctgccagggtcgtagcagcccatgaggaagattgacatcatgccgcctgggaggggagtgtgagatgagtgtgggttggaggagccatctctgccagtcccaagagcccagggccagggagaggaccttgggtcctggccgtcagagtgccagagtttacctcttggagctacctcttactaactgtgtaattttaacctttataagccccaatttcctcttctgtaaatgagggataatcacacccaacctgttgggctctggggcattgaactgtgttggacacatgatagattgcttaaaagtattagttcctcagactccagcttcctttccagtcaggaaagagattttgcctgaggagaaagctgtcaggccctgacgaaataattggtggtaagcgtccttctgctaggctagcatagggtactctattctgacttctccctaaccgagtaagcagctctgcctgaggtgactcaggccagcttggggccctagatcctaggacttcggaagtcataactggccatgctggcagatcaagccagtaacaaggccagcctgtacctcaagcggtaccttctaaaacagtaccaccccagggggcagaggccaccctgacctttgctcccttgcccatagaaggctccaaggaccaccaggtcagctgtgtcggccatggccccctcgttcaaatagtctttcttcactttcagccagtgccgcttcccaggctcatatgtaccctgaagggaagcaaaagagagaccacagaatagaaaggcaactccatgaggatgggttcaccccttcactgctacacaccagatctagcccagtgcccctccctcagggtaagagccctcaggctccaggcactataggagacacacaaagcagtcctccagatccaggacacatctgcccacacttccccagcagccaccccaaccactgcaggctgccaccgccatctcctggtcagggctggaaaggctcaggggagagggctgcgagtgagtcgacaggagaagccaagcgaggccactttaccttcacatccttcagcaccagcccctccaatccctcctggatcacccgggttatcatgtcagccaagtccaaagctttctgagggacaagagagatgctgaagttggtgtgagagtggagaaggtggtgagtgagtgggggttgttccttttcacacactagttaagtgtccactggaaacacccttacttgaaatataagggacaaagggttagaaagcaggttgcttctcatcccaaacagagggctgctgtggctttgaaacacaggaggcttacctaggaaggatttccatgccctacccttctgggtgaagactagcaggcaacatatgcaatagtcaaaggccaacattatcaggaggctccataagacattaagatttattcttccagtcgcagttgacccaaggagttctctgccctgctttcaaacttctaggacactgcctagcatagggtcttcacttactgtgactcgcttcatttctgagaacatgatccggtttggaatttcaaccatgttgtcatgaagaaacttccgccgctcacacagaggtctgaggagaacaggagagctgaggttaggccgggatcctccctcccttattaggaattctgaggaaggaagggccacaatgataaaactgctacttcaagaaagggtttgccatggatcaaagacctcatgtgtaacagttctgctgtcaagggctacaagggctccatcgtgaccgaagatggaaaattgtgagctgtggcatagagccagttcatagttgtagttcctagttctacttcatcaagcgagccaagggagaactggcctgtagcccagattgtataaattctggtcccacttgaaatacgactccaactctcattttttatcccctgcaccctgctttgccccgatcccaaggccaaccccggggtaggcaggctgagacaggccttgggacccaaaccccaaatcctacccccaccaattccttccctctctacttccttctccttccccaatcaaggatgtggctgttgcaggaggaacaggggtagagatacatttctaagtgaggaaagggctgatactggtttctcaggcacaagcatatggatgcagctaagtcaagactgctaattctctccaagatggtcccacccatggcctcccctataatccggagcttcctgttgtcagtctcttctgaaatcaaaacctctgagctgaaaaccatctgccttatgcccccaggggtgccactggagcccctaggggtgccattggagaaataaactgaaaccccatatgctcacagtctatttctctgcaatagtccattttgctttagtagagaaacttctttgggggtttgggtttcttctgtgacttaagctctcagagaagagatggagtcaacacatgggctctttcttacactgaatggggaactgatcatgtagcaattgtgcttcctctcagctccctcttgccattgcctttggcaagctcctgagcacaaacgtatgtgccagctggttccctgtaccctcctttccaacctgaagcccccatcttcctcacccaggaaatgaaaacagattcctggcagtttctgggtttaaagatgctagccaactcacctgtccatcaagctgacatcattaaagtagatacaatcaaaaacaaacaggcagacattagcatcctggaaggctgctttctgtaagggaaaatgaggtagtaggtacacataggacaaaagtcagtgtgaaaaaataaggagtaccagtccacttctggaggccccctgaggcaccggatgaaaaagtactatttctgctctgaagcccctgggccataagggcactgagcagatagtgctaaatggaaaccaacccagttataaactggttcccaataccagcccctttttaggagaaaaacaaaagacaaaaatccaaaccagaaacaggtcagaagcgaagaataagggccacactaagggatatttcctcccttttcagaccgcagcgtgcacccacatgtacatactcactcacactcattcattcttgcacatatggccctgagctagtaccttgtgtactcccagagtcccaaagggcagtggtttgcctgtcttgttgtcaatcagaagcacttcagaatccaagatcatgctgtggcccccaggaaaagcctggggaatgtagtccttaaagtgggccacctgaaagcagaaggggagctttggtgagggatgacatggcagcagggacctcaaaccatgccatggagggcaaagcccgggcccagacaggatatagaacaacatgtggaaggcccagctaatgtgcaaaacatatagctaggccttgcgagccacctggacaagagggagaggccatctgtttcagtacttctgtccgggcccaggaagaggtcaacccatgctgggtcactttctatgggctgtagagaaggtacaatttttgaggaaaatggaagaaacagattaaacctgtcgggggaggaggaggagggtaggtgggcagagattagtgcctactgcagaagatgtgtgactatcaggctggggactggattaggggagaacagactacttgaaaccagaaaggtagaaatgaactccctcaggtgcagcaaggaaacttgagcagtgtcttctctgagtgggagccctgaacccacagccatcactacccaggatgcttagagcaggaacaggaaaggccagcacatccatgccattccccttcaatccctaacctagccctttaagaacccaaatcacaggagaggcaaaggatgagtgaatactgggtaagggaaaattaaggaaaggactaaatctggaaaagtgtgctcagacttcttcctgggtcacagatggtgtctatttaacaccaacctcaccagaaacagctcctgagtgatttgcagtgcttcacagaacacgtgaacctgcattaaagctccacaatgaggccactgcttagccttcctcttgaacatatgaaacaaatggcctgactgctttgttcccaatgctccagcaggaaggcaaggctgaggtaagcacaggccacacaacatgttcccctgaaccccctgaggctctgaaaaactgagtctgagttaggaaagaaaaggatagcaaagataggaattccatctgctcacaagctaccggagccagatgttccagctgcttttccctgaagacactcccaaaggctcacagtatccttgggagtggagaagggctaaggaataaggttccaaatgccacccctgattagaacaggaatctaggctcctagatgtccccataagactgtgtttacatcagaatgtaaacttcatggtggccagaacttttgtccattttttccactgctatatccccaccagctgtaacaatgggtaagcatctgataaataattgttgaacaaattaatgaatgacagcccaatagcccctggtatataagccttagtctagctcacaggaagcatctgggacatggaaacacaaaagacacacagcaactcaccaactgagctcactgtcccaatatcactgtgggcaaaagaagtatcactgttccagggagctctatcctcacgaacccaagtcagggctctttggctctccctgctgagcagcccttcattatgggaagactccaaaaatgaataaatgaattaattcattcaacaaataaaaaacaaacccttattgtgtaccacagctggaatggctatgggactctggccctgaggttgttagaggcagaaaggggaaagacggtcctggcagaaaggaaggcactcataccttgtgaggaaggacgggcttgagactgcggctgaagtagctgaagtggtctccattcttatgcacctggactcgctctccatcgtacttgatctcagagaacatgccattgggacatttcttcattgcatactcaacggacttgcaggcctccgccttggggtggggaaagcaaagcctggagactttcaatgaggggctgctaagcagcgacagccagagaccttgcaactgggttagtgagggtagttacctgggtcttgggactgactgcccacaattaacgctcagggaaggctggtgaagaggtgatgggaacggaaagggctgggcaatgttgtattctgcctatgaaataatcacctgagctgacataggagcttgccttttgaggaatatgaatgctattcattgtacaacaagtaaaagcccagtgaaacaagatttaattcttttctcaataattcaggccttgcaagacctctggcttattataaaacacatcagttctcccagtaaaagaggtatgtgaagctaaggttaaagagtgcaggtgacagtgaggctggcagggtgagtgatcgtgggtccctacaacaaacagggtttccagatattggagcacctacttacatgcctacctgtgctagcctaactcaaacaacaatagctaccattttgggagcgcttcacatacataatctcatttcatccccgatgtgacatcctatgtgacaaatattgttttcatttttggatgataaaactgaaggttagagagaataggtgcttgcttaagttacactaaaaaatggcaagaatgagatttgaatctaggcccacctataaaacctgtgtggttaaccactaagctatataacccatgccagtctttaaatgacaaactatagaacagactccaggaggcatttttataaaagtcagaaaggccactactgcaggtggccgcagtcccatctctgggatggagatctcactgttttgatgctggctatcccacattcctagcagggagagaacacttgcctatctcaaacataaaaccctaaaccaaggttttagtatgacaaacaagacagtttcaaaaaaagcactgtacatcactcaaaaatccaaagaatctcacagtaggcatggcaccatatgtggtgggccctgtcacacaggaaaaccaacactggaaaggaaaccccatttcttacgaaatgagcagaggcctaagatgatgtctgtcagagtcagccttcattccttatgtgtcctccctcttcccaagtcaccctgtcacaggaagcctggctctgctaccaactctcagatctactttgcagtaggtcacagaatctcaggggttacttaatacatccgtcttcaggtaagataacagataaatcattctagggggatgcctcaggcagtctcagacgtcatccacacaggagactgaaggacaagagaggcaagtcactcatctaagattctacagcatcttggtggcgtagctgggcctacaactcaggtctttccactagatcctctgtcttctcctttgccttcgcctcctacagagaaatacccccttgcacctccctcttccttccctaaacttctccagtcaatttgcaagtgctctcaacactcataccctatctgatctcagcccaaaggatgtggagcttggagaggctggaaagcagaggcaggggagcactcctcaccaacatgggctgcacaggtgtcatcagcgaggcctggacgctcagagctcgtctctggcccggctccttctccacctcctgcgcgttgtgaaggacccgctccaccacatcctgcaggttgcgcgaggctttgaaggcttcataggcattggggtcaagggcgtctaacctgccaaggggtacaggaacaaggaaacaaaaccactgcctttgtttgactccatggctttggacagcaatctgtcctcacagaagaaatcctcatctgtagggaaggggttgtgttctattgtctaaagactttcacaagaggagagaaagctcttggaaaattcagctcttttgagatactgtgcctatgtggatgccgccttagcgaggagggggctggagtaggcaagagactcatactatactcactgaacgtatgccacacttcaactgtaagaactctgtgagaaaggtactgttatctccattttatatgggaaaaaatggaggcagagacaggtcaagtgacagatcagggtctcacagaaagtaagaaggtggaagggggattcaaatcctgactgggactcaaaagtcctgacaccagttgggaacaaacaaagctaacaaatgacagctcaggctgtcagcggagctgctacttacacatgttttgcacctgagttcatcttcagatcatgtttgatcaacctgatgatgcatttaaggtcattggctgtacacctagggggatgaagcacatttaacttggtcttgaagagctctggaaccccaagggaaccttcccttcccaagagagttcatctctctatgggcatggtttgacggaggcagctcccccacctggaggcaatgtcctgtagggcctgttgctgctcatcctccttggtgagcttggacagccgcagaaggaactcatccacttcctggatggtaaggaggctcttggcagctggggggaaagacttgctctgctcaaagaagactctgattgtctctgacacgtcaccctgtctccaaaaaccaaaatgccactgctgcaaccctagggtggccaagtgtatcccccaagacccaggactgaagatgaatcaagaaatttcaatcatagctcctatcccaactcaacatatctagcccacttcttagagacactagcccatccacaattcctagaaggggatggaaacttgccatggtaccagggatagagtcacggacaaaccaaagcttggtaaagccaagttataggagaaaacaagcaagaaaaaaagagtccagaataaaagccccaggagagacagagggggcaagtctcaaattctgccttttg

SEQ ID NO: 5697 - DNA, 193301 bp, Homo sapiens
  MYOM1 gene - 3056806 - 3210106 of chr18; NCBI Entrez Gene ID: 8736; Build 35; sequence includes 20,000 bases upstream of initiation codon and 20,000 bases downstream of termination codon of the gene
aatccccgaaataaaactaatacctaaaacaaaaattatagtcgatgcttactttagccaatcttttagtttcctcatctgtaaaagggcataataatagtgcccactttattcagtggttgtgaggataaagcacaataatccatgtaaatttcttagggagaaatttactactctgactaataaatatatgaattctttgtccacttgagtgtaggaaacaagctaagtggttgcactttaagttaatgaccacagacttcaagtgggccctcgatgcccacaacatttctctagtcttttcatgctccgctctctcaatttctttttttttttttttttttttttttttgagacaaggtgttgctgtgtcacccaggccagactgcagtggtaccatcatggctcactgcagccttggcctcctaagggtcaatcagtcctcccacctcagcttcctgagtagctaggactacaggtgtacaccactacacctggctaatttttgtattatttgtagagacaggatttctccacgttgctcaggcttggtcttgaactcctgagctctagctctctgcctgcgttggcctcaaaagtgttgagattacaggcatgaggcaccatcccctggcccatgctcttgtctatttgatgtcagttttataacttttgtctcttcacacctctaacacattctattctatcctcactctcagttgacaaccttgctgctaagtcactgagaagataatggctctcacgagcccccaccacatttacccaccagccaacatctgtcttcatgcattgtcctccccctcctctcctgctaactagagaggaactctccttgctcctatagaaagccagctcctctgttttcttgctcatgccacaccagcaattctgccctctcctgcatcatcaagttctctctgttggagtatccccatcaacatgaatgctgtaatgtaccccgtatgtataagcagactaaggacccccaaaagatatccctgtcctaattcccagaacctgtgattgtgttaggttacacagcagaggagaatcaagggagaagatggaatgaggttaataatgagctgatcttaaaatacagagattatcctgtactatctgggtatacccagcgttgccacaagaggtcttggaagaagagggaggcagaagaagactgttagagaaagatgtgactgtggaagaagggtcaaagagatacaatgttgctggccttaaagatggaagaaggggtcaggagccagggaatgcaggaagcctctagaagctgaaacaggctaggaaactgattctcccctagagcctcaggaaaggaacacagtctccctgacagcttaattttagcctggtgagatccacattggacttccaacctacaagattgtaagatgactaagttgtgttgttttaagccactaaatttgtggtaatttgttacagcagcaataaaaaactaatgtaccgtatcacaaacaaacaacaaaaactcgcttcagctgttgtcctattttcttgctcccttatagaaaaccctttaaataagtcaccaagtcacctgtactcactggttctcgatgcccccacccccccaccaatttagtaaaatgtacataacatgaaatttcccatcttcaccatgtttattgtatagctcagtgcaggggtccccaacaccccctgcctcccccctcccccaggtcggagggagtgatgctttgtctgtacttacaactgctccccatcgctcacattactgcgtgagctctgtctgctgtcagatcggcagtggctttagattctcttaggagcatgagccctattgtgaactgtgcattgcgaggaatctaggtcatgttctccttttgagaatctaatgcctgatgatctgtcactgtctcccatcacccctgagatgggaccgtccagttgtaggagaacaagcccagggctcccactgattctacattatggtgagttgtatatgtatttcattatatattacaatgtaataataacagaaataagatgcactataaatgtaatgagttgaatcattctgaaatcattgccccccgaccgccacccctgccccagtccctggaaatatcgtcttcctcgaaactgatccctggtgccaaaaaggttgggaactaaaagcttagtggattaaatatatttgtagtgttatgcatcaccaccatccagctccataactctttgcatcttgtaaaactgaaattctatgaccattaaacaataactccccattcctcccttcccccagtaaccaccattctactttctgtctagaattctggccactctaagtatttcatgtaagttatggaatcataagagtatttgtctttttgtgactggcttatttcacttagcataatgttcttgaggttcaccgatgttgtaacatgtcagaatgtatttccttttttttttttttttttttttttgagacggagtcttgcactgttgcccaggctggagtgcagtggtgtgatctcggctcactgcaagctccacctcccgggttcacgccattctcctgcctcagcctcccaagtagctgggattccaggtgcccgccaccacgcccggctaatttttgtatttttagtagagactgggtttcaccttgttagccaggatggtcttgatctcctgacctcgtgatccacctgcctcagcctcccaccgtgctgggattacaggcgtgagccaccacacccggccatgtctttcctttttaaggctgaatgatattccacgatatgtatacaccacattttccttatctgttcatttgttgatggacacttgggttgcttctacattttagctattgtgagtagtgctgctatgaacatgggtatacaaacccaattctctctttattttagtttttacttttttctttctcagtgatccttttctgaccaattatctcttgaatctgctataataaatcttttttttctgaccactccatcaaatgtgtgctcgtcaaggtcaccagtgacctctacatcctcatagccaattcacagttctcaaatagtattagaaaaggtgctcactccctcacctttgaaataccttcttctctggcttccaggatgccacactgtcctggtttctgccttcatttgtggttactcttcagtctcctttgccaattcctcctaatttcgctaatcacatggagtagcctaggattcagtgcttggatctcttctcttttctgtcagccgtccttttgagctgacctcatccactctcatagctttaaataccacttatacaccgatcaccaagtgtgtatctctagccaagacctgtgacctttactccagactcacatatctaacctctcacttgacagctccatgaggatgtctgttgggcatgtaaaccttcacactccacaaatgatctaatcttacctccaaaacctgctcatcctgtttgtcttctccatcctttaagttgctcaggccgaaaactttgactcacctttgccacctctttttctttcctgcccctcactcaacttttcagtcaattctggtaggattttctgtcttctttgttcatagatgtatctccatggcctaaaaccataattagcacaagcctattagcaaagtccttcaaaatatatccagaattttattaagtctcaccacttctactgccactatcccagtgcaagtcattttcatctcaagcctggacttttgttaaagcctcctaaagaggtctaagtagttttcttacttccttttcttcctatagtctgttctccacatagcagatagagtaatcctttaactataaactagagcacatcattgttctgcctgacaccctccatggtgaagtgaagtgtcctaccacctctacttacgtgactatgctgagtgaagtgtcctacttcactcagagtaaaagcccagtgctttaccatggcctgcaaggcccaataactcaggttctgggaacttccccaccctcttctcctacttcctgccctccccagtctgctcagccatattgacatcctaaatgtttcttgaacaagtcacataactttccacctcaagacctttgcatttgatgttcctgatttcaatgctctttcttcagattcttcactactcatgccctcaactctttcgcatcttcaagaagatactaccatctcagtaaagccttctctggtcattccattttaagtctccatcacccagcttccacccacagcgttcccctctctcggtttattttttccattgcacttattacttccaacacaccaggcactttactcattttgtttaccatctgtctcccctactaagttccatgaagaggatcttttggctgctttgtttactaaagtatcccaaggtccagaagagtagttggcacattataggcattcaatgtataaagatgcatatttgaatgaatgaattgctagaaggcagaatataaagggaaaatttagaaacatgaggccaacaagggaagcagggactgtgtcctcagtgacttctaagccatgtttcaaaggtcagtgggatgccatgcatacattttaagtatgggattagtatgttcagaatcgtattatttaaaaagcactctagtaatagtatggaggattagcagagggtaagtctgggagaagctcaagatttctgacagatggtaaggccactcactgaagtaaggaggagaaatagtttggagggcagagtgtggtaatggtaggaaatgacagttatcatttgggacattttgaggtaatggattagaagtactgaggccttaacccaaacacagtacaaagagacaaaaagaaaaaaatgtagaagtgctgtcaagaatcatggaggatgtattgagatgacatggtataaatttgtgtataggaaagccagaacaagataaagtgagaatgatggaaaaaacaatatcaaaagtatgtcgggccaggcgcagtggcttacacctgtaatcccagtactttgggaggctgaggagggagaactgcttgaggccaggagttcgagaccagcctgggcaatccagcgtgaacccccatctctaaaaaaaaaaaaaatttaaagagataatgacagagttttctgaaactgaaagagagaccaaatttttcattcaaatggagagtgtactctgactatcaagcaggaaaaataaaatatataaaatctgtagtaagttctatcacaatgaagctgcagaacatgcagggtaaaagggaaatggtaaaagctgccagaaaaaaagggagtgtcttcaatggaacaataattaggctggcagcctgctttcctgtagcaaccgtgcaagctgaaggtggcacagcaatagcttcaaaatgctgtgagaatcgccgcccactcctcactgtgtgtgggctgggtgtggcacgctggcaactctccccaaacgactctggatgctggtgtccctagaatctcttgggtctaaagattgatcttcttacctcctataattcctgaggtggataattaactagggggtcacaaaattaattccacaatcttgtaacatgtcctgtatagatgttttgacaatgaacgtttccagcttttgggacagctcccacaattctaaaataatgggaatgtcatgcttaacatcctagtacggtgaacaatgttacataatttgggattttcctctactgtttcctgtatgtttgacttgcttcccaaactggcttgtaaacatatattacttttacattagctaagtagaagtttttcaatgtatacttttaacaataataataaacattatattcttcttcttcttctttattgagcacgtcctatgagccaagctctctgcaaagtgttttattcacattatctctcattaacattagctgcaaggtaatgactgtcacctccattttacagatgagtgagctgaagcttagcaaggttagtgacctgcccagggtcatattctgggtaagaggaaaaggtaggaatgtgacgcatgtctgtataacttcaaagcctgacctttcagcctctgtgctatattgatctgtgaaacatactaactattgataagaatgactgtgttaataatttggagtgggaatatttacttgaaatgttgacttttttgttgttattcttcccggaaaaagagtctgtatggtctcttgcagaatttccagcaaggcctaattccactgaaatcagtgcctctaccagccacctgtagatgtattatggactttgattgagttcttctttcctctggagaaggaatggtagatgaatccgtggacagtttccattcatatgacttgtcagcattgaacacataacacctctttttgcattacctcacagagtgttgattcagtaaagcattaaagctgtgggctggcagtgctacccagtaatccctgaagggccagagagccataggttaagtttggaggggctttaccagggtctattattcagtgtcctgccatgtgctacacagttcattatttgcttgaggaaaaagagcaagccctgatagtaagcgggtaaggggacatgcttcccaagagtaacttactctgtttgtactctcaataccttgcagagtgctagccatgtcatgtgtgcttagtaaaacctcagttaaatctataaactttaagaactttggaacaaaagtagtagaaaaagtaagggagttttagcaagtgggtaaatgatgaaagtaatcctgtgttgaaactcaaccagatgaatgttgttaccaaacttctgtacggtccactaggtccaaaaataaatttttgtggtacataggtagtagaagtggccagattagccatagacagatcttgtttacatataaaggcacaataaaaactattgtccaaggcaggggagaacaatgcataaaatctttaatatatctatactagttcttacagtaattatttctattatatgctctttccattataaaatgctcattagggtgcatgccttagcatgactttaaaacactacaaaggaacaaaatttcaaacctccaaatcagattgtactacgtttaaaaataggaaaattggccaaggaatgaaaaatattaatagaaataaatttaaaactgcagtgctcaacacatgattttccaatggtgaaacatatttatgtgaaatacagttggaaaatagattattaaaactgaaaaatataaacatataattaatttcttatagcatatatcacaactgcaggtgaattataggtaagcatggaacataaagcataataagttgaatagaattgtataagtatccttgttgggaagaagagtagacatttttaaaaatggctttaactaatgtattattagaacacaataaactacacatatttaaactgtaccaagtgacaaattttaatacatgtatacacttgtgaaaccatcatcgcaatcaagatagtaacatacccatcaccccagagtgctctcgggctccactgtgacccattgctcccaagtcttcccacctgtcccctctcccagacccacacaaccactgatctgctttctgttactatcatttgcatgaatttaagtttttgactagtaaagtggttattgattatatgacggatggttctacttttttttttttccatgatggagtcttactctgttgcccaggctggagtacaagggcaccatctcggctcactgcaagctccgcctccaggattcaagcaattcttgtgcctcagcctctcgagtagctgggattacaggagtgtgccacaacaccccgctaatttttgtatttttagttgagacggggttttaccatgttggccaggctggtcttgaactcctgaccttaggtgatccgccagcctcagcctcccaaagtgctgggattacaggtgtgagtcgctgctcctggccgggttctacttttaaaaattcaaaatataattaaaaaaagcaaggaaataactgaaatggaaactttttgtggtaaatgacaagtaaaagcttaatatctacactagcaaacatttaatagaaagaatattttattttggcttgtttgattgcaaggaacagggacagtccaattaactaaaaaaaaaaaaaaaaaaaaaggatgcggctgggcgcagtggctcatgcctgtaatcccagcactttgggaggccgaggctggcagatcacgaggtcaagaaatcgagaccatcctggccaacatggtgaaaccccgtctctactaaaaatacaaaaattagctgggcgtggtggcacgcacctgtagttaattccagctactggggaggctgaggcaggagaattgcttgaacccgggaggcagaggttgtagcgagccaagatcgcgccattgcacaccagcctgggcagcaagagtgaaattccgtctaaaaaaaaaaaaaaaaaaaaaaaggatgcatattttagggatacacatgactggattactgctgaaaacagaggtagtttgaaggcttggctcttcaggttttctctcaagggtttcatgggccaaatgtttgttctccagttgcacctctgcttctttaagcccatttgttttgtttgctccctgccacccatctttgctaactttagtttgcggtccctcataatttcagcatgctgtggctcatctgattccaaatacacccgtggcataccttgattcagcctctttgactttcgttccttctattaagtgtattgacactcagtcttttcaaattcaaattcttacgggaggagtgtgattggcttggctcgcctttttggcccaggccattcactgttacctttagatcagaaatgacccatcacctgggatcaaaaagcaaggtcacctagttctaaacatcagcagggcagctttcctcaggaaggggtatgagtagtgcaggcattgagtgctttcctgtctagcaaagataatggtgcttgagagccagctggaactgggttcaaatcccagctctattatttagtagctgtgtcactttggggtacttgcctaacctctctgagccttggtttttttgttactgttggaaggtgtccaagttcttggcatcatgaacaaagaattggacaaaatgcacaaacaaagcaaggacagaatgatgcaacaaaagcagagatttattgaaaatgaaagtatactccatatggtgggagcggcccaagtaagtggctcaagagcccagttacggaattttccggggtttaaataccctctagaagttccccattggttacttggtgtacaccctaggtaaaggaagtagtggcctgagatcagtctgattgattgcaggagagggccaatcagaggctgaagcaaggttacaaagttacaccctatgcaaaggtctgattggttgcagaaagtgaccaatcagaggctgaagtgaagttacaaagttatactactatgcaaatgaaaacttggccggcaaccagcctgattgtctcccagaggggacaaatcagaggcactttcaatttttcatctgtcactcagaaaacgggaggttgcaaatgtattagcctctggtcctttcgttacctgggcatggaaagttggggttttccttgtgatttagttctgggaagtcagcatgaattcggccttaggttccctgcctccagaccctattctcctgcctcattttcattttagcttgggaataataactgccttgaagagattttgtaacaaatatataaaataatatctgtaaagcactggtatagtatctagcacacaataggtctcaaataatggtagctattttattatcacattaacagattaataatgatctcaggaaaaagatacctcacagaagaggaaagccaaatagtgggataacatttaaggacatgctcagcctcacaaataattttttaaacgcatttgaggatagctatgagacatatctcacttctttttttttttttttttttttttgagatggagtttcactcttgttgcctaggatggagtgcaatggcgcaatctcggctcactgcaacctccgcctcctgggttcaactgattctccattctcctgcttcatcctcctgagtagctgggattacaggcatgcaccaccacgcctggctaattttgtatttttaatagagacaagttttctccatgttggtcaggctggtcttgaactctcgacctcaggtgatccgcatgccttgacctcccaaagtgctgggattacaggcgtgagccaccgcgcccggccacatctcactactgttaaacttgcaaaaataaattaaaattaaccattccaatattgatggggcaatgaggaaagagtacattcatatttggttgatgacattatacattagcctaattattccaaatagcaatctcataaaacataccctccaattcatagtaccttctgggcaaatacttcccaaggaggtagttaaaaaggaatacttctatttgtgcaaaatatttatagctttctttttaattcaggcttttatccttttcgaactgaaagagacctaagaggttttttttttttttctcttgggttgcatgttagaatcatttaggagcttttaaaaaatactgatgttcatgtctcatgccagagatatggagttaattgtcctagaatatggcctaggcctgagtacagtttcaaagctcctcaggtgatactaatgtatagccaggaaggagaaccactcttccaatcccactctattgggggaactatgaataaacaagagcccgagaggctaaaaaaggcctctcaaaagaagtcacagagaggtgataaaagagctgggttgaaactaaagatgctccaaatgcctgcttccagcttctagtcctggtgaatgactggaaatttccaggtgctcaacacttagagaccaggtaacaaattatagcagagcaatacaacacattcattcattgttattgaaaggacaactgcggacagggtaggacattggtgagaaccaagtgcaatactggtgcatccagtatccagatgaaactcaaaaacatcttgccaagtgaaagaaaccagacacaaatgactacatatggtaggattccatttgtgtgaaatttctagaaaaagctgaactgtagagacagaggtcagtggtggcctcggtcacgcgcgggacccaggattaactgcagacaagcctgaggaaacttttctgggtgatggaagtgttttaaaactggattttggtgatggttgcacaatgtaaaaattgactaaaactccctgaactttactcttaaaatggattaatttatggtgtgtcaattttattgctataaactgttaaaaggaaattcgaaatgaattgaaactgaaaactcagatctgctgatctttattctggttcttacttttaaaggaaaaaaaaaaccatatgatttttgtaaaagtaacacacagtcattgtcgggagacagttctccgcgggcttcttgtgtttcggcacatgttgcaagcgaagatctggctctccgttgttccagcctgtttctgcaggactgttcatatagtgaacagcctttgaagacagagtaagtgtctccagccacagcaaaaggcagacacgcttactatccagtgtaacaagaatatctccctctgaagcaaagggcaggtatgctgaatgctcatgatgaaatattcaggtgctctaaagtcaagattcttcttctgtaatgcagcccactgtgactgcaggtgtcacctggtcttcatcacgttgtcctttgggaacatggggattgggggctggcaaaccagtgaagaatatgctgacacttggccactgctcttgctgtcaggagtaaagctctttgtcttcttgtgtcttctgtcaacactcatgaaactgtagcaggatcactttttagtttgcaagtagggtaaaatctctgactcctgcgttcctttttttaaaaaattgtggtaaaatatacacaacattaaatttaccattttagccattttagggatacagttcagtggcagtaagtacatttacactgttgtataactatcgccattacacatctctacagctttttaaaaattaattaatttttttttgagatggagtctcgtacggccccctggcctagagtgcagtggctcgatggctcactgcaacctccgcctgctgggttcaagcgattctcctgcctcagcctcccaagtagctgggattacaggtgcctgccaccatacccagctaatttttttgtatttttagtaaaagcagggtttcaccatgttggccaggctggtctcaaactcctgaccttgtgactcgcccacctcggtctcccaaagtgttgggattacaggtgtgagccaccgcgcccggctcacattgctctagagctttttaatcatcccatgttgaaactctacccattaagctatactcctcattaccccctttccccagcccctggcaaccactgttctgctttctctataaactcgactactctaggtacctcatataagtggaatcatacactatttgtccttgtgtgactggcttatttcactttgcataatgtcttcagggttcatccatgttgtagtgtgtgtcaggatttcactcctttttaaggctgaataatattccattgtatgtatataccttcacagttcttgatgctaattatatcttaaaatcaagtaaaaaaaatacaaacaagaaagttaaaaaaaaacaaaagaaagagaaagcatctcatcatttggaagtcattatcataccagatatctatttatgaatagacagaaaaacaggtagagacaaaaaatgttagaaaatgggctttggggtcttgctttctaatactcacctccagttccctggcctggactatgcgtgcaggcagctttctggcttaggggcttgtccctctcccagaatctacccaccagctcctgagcctcacacgcaggttaagaggggctcacagcagttgtcctccccgcagctgaacagctgatccctggccacactgactcctagcccttgttttttcccatctctaaggagtccctatgtcctgaggagttgtcctttgccacatttcccagttttcctcattcagtaattctttattaaatgcctgttgtgggtcaggagctttgctgggtactgggagcacctagccatagagatcccgctcctaccagtgagtactcattgtgcagagacagaaaagtaaacacgtaaataccacacgaaaaacttcccatcctagtggaagtagggaagtctcccggaaggagatggcacggggtgttgaaggagcggggtgaaggaagtgaggaagtgtgcgcgtgttggcagggctgagaggagcaccaggtgtgagggaaccggggtgctggagtcctggagtttgagggcttgcaaggaattacccgtggttgaaactcaggaggcaggcaggggaatggagaggggcggagctggagaattatggaggctcatagggtgaagatgccctcgtgccatgctgaggaggccacctggggaagaataggcagtgaggagccattggaaggtttgaagcagaagaggacatagtgagctctgtctgaatgcattctccctttgtcatagcgtcagctcacattctgtcctcaatcccagtgcctggcttactgcagcacttctactctccaacccgtgcaccactcatgctgacgaatgaatggaacacaatgttccttaggtcttcagcaaatgccacataatgtatgcattagggttacaaatgaacagattcatgaaatggaattttgattctccagtagtttggttctagttctagttgcgaatgccattatgtgaaaatactgatggggccatctctcttctcgaagtgcaagattttgaaattgtgtcatatttctggaaattcaaacacatcatttactgacaatcactggtgaatgatgaaagggcaatacttcagtctaagtcaacccaattcctgacagaccacaggaaagcaaaaagattaatcagccttggctgcctgacctgttctttgtcctcagccataatacagcatgcagacaattcttcattaaccagagagggggaagaaggggcgtgctgggaggagggtgtggatcagcataaccatggtcaactttccatggccttgggacatattaaatgtggctaaggctcagctggactttggacatgttcggcatttaagacgctgcccattcatactgagtctgccctccttcacctccaaaaggagtagtctaggaagagaggtgccaagcctttgttctggagtctggggctctggaagaggccaagatcactcctccccctctgtattgggagcttcaacagaggccacttgctacccccctcctttggcttatagggaagtagtttatcagcttctattcaattatccaacaattcaaggggcaggtgcaccttaacaaataaagggcttccctcccttctcctgtgaacaggggaagaaggttcagatgggcaaaatgagcttctttgatgcaggaaggaattgagaagagagagaagtatgggcgactaatgaagaataaaaagtaatcccaggcctggcacggtggctcacgcctgtaatcccggcactttgggaggccaaggcgggcagatcacgaggtcaggagatcgagaccatcctggctaacacggtgaaactctctactaaaaaaaaatacaaaaaattagttgggcgtggtggcaggtgcctgtagtcccagctactcaggaggctgaggcaggagaacggtgtgaacccgggaggtggagcttgcagtgagctgagatggcgccactgcgctccagcctgggtgaaagagcgagactccgtctcaaaataaaataaaataaaataaaataataatactaataataggccgggcacggtggctcacgcctgtaatcccagcactttgggaggccgagttgggtggatcacgaggtcagcagttcaataccaacctggccaagatggtgaaaccctgtctctactaaaaacacacaaaaaattagccgggcatggtggtgggcgcctgcaatcccagctatttaggaggctgaggcagagaattgcttgaacccaagaggcggaggttgcagtgagccgagattatgccactgcattccagcctgggcgacagagtgagactccatttcaaaaataataataataataatgataattccatttccataaccatgagtggagcatttcacaacaaattatgtttgtgcttcctaatggcctggagtctggtctagaggacagggtaataggcaaggatctgactaaggctcgggccctatcccacttacctgccagttctgcaccatggcaggcatgccctcttccaaggctgggctttcagcccagcacttcttcccctttccaaaactgggaaaggagctcacaggggcccctcccagtctgtggattctgatgcaagatgtcaacagcattggccttaattttgccattgcccagatacactcaacattcaaactagatctaattttatgtcgggtgcagtagctcatgcctgtaatcccagaactttgggaggctgaggcaggcagatcacttgaggtcagaagttcgaggccagcctggccaacatggcgaaacctactaaaaatacaaaaattagccgggtgacaaggcgggcgcctgtagtcccagctactcgggaggctgaagcaggagaatctcttgaacctgggaggtggaggttgcagtgagctgagatcatgccattgcactccagcctgggtgacacagtgagcctgtgtctcaaaaaaaaaaaaaaaaaatctaatgttagatttagttcacctagtttagatctaggtcatttaataactagatgaaatttggcttctgataagagtcctaggccccactctccagccactcgcaccctcaccgctggctctgcttccctccctctccgctactcattatacacaaagacttaaaagaaacaataacatattgaaatacctttctgggttattttcagcatagtagggattaaagtcataaaatgacactctcagggaggagtatttcagatgtgagccagcaggtagaagcagagtttttggatcagggatgatttgttttattcttcccacaaattgctccacacagaatgttgctaatctgcttatgagcaaggcaagaatagaatagttactttgtggattgatagcacaggttattagagctggaaagcaccttagtgatcatctagctctaagccctttagtttacagatgagaaaatggagcttcagagaggtgaaatgatttttcaaagttactcagtaaaccacaggactagatgccaaatatgatacctttcttattttagtgttgcctataaattagtcaacactgaagtaggaaggatacagcaaatttatggctttcaaaagagctcactgaacaatttatttaagcttttccttccgtggaaaacatccgcattgaagaaaaaatgaacaaaaataggagatataagtcctcataatggtagctaatatttaatgactatttgctatatgccaggaagtaatactgttttacaatatcttatttgattatcttatgcatgattatcatgaaaacattttatgaattaagaaattgagatttacagccagacatggtggctcacacctgtaatcccagcactttgggaggccaaggcaggcagattgcttgaactcaggagttcgagaccatcctggcaacatggtgaaaccccatctctacaaaagtacaaacattagccaggtgttgtggcatgtgcctgtagtcccacctactcgggaggctgaggtgggagaattgcttgaggctgaggaggtcgaggttgcagtgagccaagattgcaccactgcattccagcctgagcaacagagcgagagaccctgtctcaaaaagaaaaaaaaaattgagatttagagagattaatatccttaaagtcacaaccagaaggtgacagaggatggaacccaggactgttccacacagagcatagcctcctatatatgatactatgctgcctctcaaccatttaactgtgtgtgtatgcctgtttgtgtgtgtatgtgtgtatgtgcacacgtacacatttatgttgatagagagcaccatgtgccaatactgtccattagaaggaagaaatgttacagaagaagagtttcatttatgtttcttattaacagacaataatttattaggtcaaaatgtactggctacaagtatcaatacatttaaatatttactgaactttcatccttgttaaaaatacaaaaatgagagaagtgcacacacactatagaaaaactaaaatattatcattgattcattgatactcaagatccctgtgaaagcaagagtttattccaaacaaatatacagtaagtttagacaaaagaagcatgagctagacccagcagaatctcctaagtgatctttctgctgtggcatcatctagattcaggtttttctaacagcaaatttatctgaattacaactagctacataataaattacatatggtgatgtactggataataaaactaaagaagaaaaacttgggctcatatgaatcaattattgtaacttagttatgattcctttatatatgtggactctggtcaattacacttactcatgatacccttacagatatgtgattatcctgaaaacttaatggagtggttagccagctgttaatttcaaatttcccagaaaatcatctaatgtaaaacactttttaaaaagcatataagtttatttttcctcttttctgctttgagaagatttggggcaattgaccaatgttctctagagaaacagctcaccaggaatcatcctaatggctggtggataagacttgagaagaatcactgcattctgtattggatatttagagaacaaatggatgcttggggaacataacacttggaaaactcgcctatggcttccagatagctaaaatgtccacatgcttactaatagcagaggtatgtatatgaagaaattccaggttgaatttcacaggtacctggatcagaactaggtggaacagattcttttacatactttgagtagctcagaagctaaccgtctattacaagtgaagacccgtattgccatttcaaaatgtctagtttcttactatcaaagtgccactggaggagccagcaatacatgactacaagtacacgggctttggaatcaaatgtctctgaatgaagttgcgtttctgtcatctacccgctgtgtgatctttggcaaatgccttcccttctggaagctttgctttcctcaacggggtaatgaagctgtaccttgcaaggtatgataagtcagtgggatcatgtatataaactgcctatcccagtgtctggcactggataggtcctcaacagtgttaactgtagttatcatcaagaaagtcatgatgaagtatactataatattgagtctgttcaatatcttgatagagactgggtgcagtggctcacgcctgtaattccagcactttgtgagactgaggcaggtggattactcgagtccaggagtttgagaccagcctgggcaacatggtgaaactccatttctaccaagagttaaaaaaaaaaattagccgagtgtgatggcatgcgcctgtagctactcgggaggctgaggtgggaggattgcttgagcctgggaggcagaggttgcagtgagccaagactgcaccactgcactccagcctgggcaacagagtgagaccctgtctcagaaagaaaaacaattttgatagacacaggtgacctttattcagttgatgtaatatcactgtcagaacataaggccagtagatcaaaataccaacctgctgcatacatgtaatctaacaatgagcttttatattattggtatcagtaataacagctgatatttactgagtctatattatgtgactgtcactaggtcaagtgctctgtctgcagtatcacatttaatcaccacagcaatcctataatttggatatgattatccccattttatagacaaaaaacctgaagcttaggaaggagaaataaattgctggagattacatggctactaagtgctatcaatatagtgggatctagatctggtctgaatccacaacacaggctctcacaaccgggttacacctcctcttaattggtcacaccatttaaagaacaaagaaagagaatctcttattagatggactgaccctactctgagttaggaaagataaaacactgagttgcgtctcaaaaggctttagttaatgaacaggaaatcacatattcaggcttgaagctaagacttaaccttgtaaattttcctgaagtgagagaaatagtgaccgtgatgtcaggcaaaaatcgccaccacgtgtaacccatttcttccttgttttgcctttagttagcttcaagttcttttttcacattgtatcttttaaatgtaccgtacgtgtgttgttaacagcacactcagaatcatatcttggcattaaaattccacgaagtccattttgagaatcatattactacacctatttttagctgttaacacaaaccactctttccattacacttttaaattatctactgataaagtgacattgaaaataactcttgttgccaaataaaaaccctatatttggtttaatcgggccagacccattgaccggcattatgcaattatattactaaggctgctacctgcccatgcccctctcctcctcctggtttggaactaccctccccatctgctgctatatttatctgccttcttggccataaaaggctggttgtgtggcctgacattcgactgcctgaccacatgcattatttttgaactggcccccagggtcctgtctttagccctgcctcttaacattgtcttggattcaacctaggtggagtcttcattctctcatccagctcctcggcctcatcggaacatttccaccaccattactcctttggaaactggtaagtgtgacactgaggcagaagaatgcacttgatagcttatgagcttagcagcagtgcagtgtaagtgctttctttctgtcttctgaactcagcagttttctcaaagagatgtcagaataacagagaaataggaaagtgaagctccagggagggaaaccagaacagccgggtgccagtcgggctggcacagctcttctctcacatcactgtattcttctgaaattaagctgctgttcctggaactgtaaggaggtcatatctgcctcggattgaactgtaagcgtgtgtttaatgctatttccaagtacggtttggttgaaatctgaaatggatgagagacaggaggccctgcattttcaatcctgcatgtgccatacaatgctccctggttacaaattagaccgaaagaaggaaaattaactctgaagtcactagtttataattcagggatcttgctgtgacgatgcaatgtggataaatgtgagcgcgcacaatgatatggcctcaaatggttaagtaatatttcagaggcaacatagagccccacatagtgatttttctgggaatcgttttcatcagcttctgccctctaatgcctgcacaaaagtatcataaattacagctatggaatttgtatttcttcctaaattctcaaattattttcagaaagaaaatttaggtcttaaagaaacaaaagacactaaaaccatctttcctcccaacgtactccagccgtcatgtgttggagctaatcctggctttagttaacttcaagggcttacttgatgaagaggaggtggttgtacctttgttccagaggtcagggctgtgacaatcagcaatgtgggcttcaagtcaaaccctgtttacttgtaacttactatctatgtgagaggaatagtaagtattattaaaaataaatgtatttgggagaaatagaaataaagagagtaaaaaatagtattggggcaagatatttaaagattttattttgtgaaaataacagcatttcaagtcatctggggaatgaatttagtttataacataacaagtttctttattatttatttgaaaaatcattcaaataacatgtgccatgttacaatgtagtatcataacagaaacttctctaatatctttataactgcctaacgtaattctgtattaacattttctaacccctttgttttatcaaaattcatctagtagttattaattatacatggtaattatcctccatattttgtaacagaaaatagccatctatttaagggttgaagcaaagttgcttgctagtagctatttttttcccttaggaaatgccctgtagactgatatcttccatgaaccctaagataaatatttctggagtgaagtttgctcagttttcttctctggggaatacatgctgacttttaaaatagtttaaataaaaagtagttttaaacttgacaaagaatatgctgagtttagaaggattcattcttcattttgaatttttttaaaaatgacatttggagaaaacagatcactttaaaactaattctacagcattaaaacacttgggggtggagcttttataaaactattacttcatccagggttgtcaacgtggctgataggcctgcttcagtggataaactattcaagaatgctaaggccatgtgacatctccccaccctatgctaaacaaacatacctttgacttttagtagaactgctagctcaagttcacaatgccagctgtcaccctgggaatcgactctcttacctctttaagtagggagactagaagcctgcatgttccttatagagcaaacaggtttttttgtttgttttgttttgttttctggtttgagactatacctttgcttgaaatgtttgtgagatttgagagagcttatatataagattagcatactccagggttcagttctaggactttattttacttattttattttatcttaaatttttataatagagacaaggtctcaccacgttgcccaggctggtctcaaactcctgggctcaggaaatcctcctgccttggcctctcaaagtgctggaattacaagcatgagccaccatgcctgtaatttccttttctgtgtataatggtcctcatctgttttcttttaggactttcttttccgtgtacaatggttctcacctattttcttggctttcgataccacctatatgctgttgactcccaaatgtatatctgcatcctggacctctctcctgcactccagagtcatgtatccagcttcccacttaaaatgtctcctctgggaggtctaacaggcatctcagatgtagagcattgaaaccaatctcctgttcttccaccccaaactgatactttcccacattcctccccatctcagttaatagcaacttgtctttcaattgctcaggcaaaaaccttggagtcatctctttctttcacatcctaattcagaactttcagcaaatgccattggttctaacttcaaaagctgtgcagagcttgaccacctctcacactttcgctgctacccctgtcacctctagcctggaccattgcagtggactttgtattcttttgcccgggctatcatagctaagcgccatggactgggtggcttaaacaacagaaacttattaccttacaactctggaggctggaagtccaagatcaaggtgtcagctgggtggtttcttctcaggtctcttctcggctcatggatggctgtcttctccctgtgtctccacgtggccttccctctgttatatacatatttggatcttggttttcttttcctatagagacaccatcatatagaattacggcccatcctaatggcctaattttaactcaacttcctctttaaggaccctatctccaaatatggtcacatgttgaggtactggaggttagggcttcaacacaggaattttgagaggatacaactcagccctttcataggtcttctggctttcactctcatccctccacagtccatcttcagacatcggcgagaatgagtctcagctcagagtcttccaatggcctctcagccctttcacagtattagctgaagtccttactgctacctacaggaccctacactactggcccttccaccaggcacatagctcacctctttgacatcatctcctatacctctcccatcccagaacccctgccaatcagtggttcctggagcacaatagtcatgttcattcctcagtgcctttgctctggtcttccttctggaatactcttccccagaaagtctcatgctcagatgttactgtctagagaagccatccctgctgaggctgttgaaaattgcatccatccctcttacctgctttgtttttctctggttcttggcacattaacctatctcatacttgacttacttgttttctctattgtctttctcctgcagtagactgtacagttctgtacaaggtaattagagcaggcattttgtctgttttgtttaccactgtatttcttttttgttttgtttcattgtgagacagagtctttctctgttgcccagtatggagtgcagtggcgcaacctcggctcactgcaaactccgcctctgagttcaagtgattctcctgcctcagccaccggagtagctgggactacaggtgcccaccaccatgccaggctaatttttgtatttttagtagagatggggtttcgccatgttggccgggctggtcttgaactcctgacctcaagtgatccgcctgcctcggcctcccaaagtgctgggattacaggcgtgacccactgtgcccggcctcactactggatttcatgggctggatggcgtcaggcacacagtaggtgctgctaattatttgttgaatgaacaccacatgactctctatccttccacattctcccaaatgaagtcccaaatgaagaatgaaatggcagaaaattagaaatatgtattatgaagagtctgaggaaagagcacaatagccagggtagaaaaactttgtttttctaggaaaacctcctagatacaattttttttaaaaaaaggtacaatgacaggaggggcatatctgggctatgaagtggagagttttttgaatatccagttatgttaaacttcataccctttttggtttactcttcggaaaagataagaatattaatttttattttattttgtttttagacagtgtcttgctctgtcacccaagctgagtgcaatggtcaatcatagctccctgcagcctcgaagtcttgggctcaagcaatcctcctgcctcagcctccggagtagctgggactacagacacacacaccacacccggctaattttttctttttgtagagatagggtctcactgtgttggccaggttgattttgagctcccggcctcgagagatcctcgttgggatttcaagcatgaaccaccgcacccagccaagagtattgatttttacacattgatttagatgacttggtctatggaatttgttccttaataagtcactcaaaaagtgttgttttccttcaggtggcccggttccttcaaggggcacaggatgtctttgcctttttatcagaggtgccaccagcactatgatctcagctaccgcaacaaggacgtgcgcagcaccgtgagtcactaccagcgggagaagaaacgctccgccgtctacacccagggctccacggcctacagcagccgctcctccgccgcgcaccgccgggagtccgaggccttccgtcgggcgtccgcctcctcctcccagcagcaggcctcgcagcacgccctgagctctgaagtcagtcggaaggcagcctcagcctacgattatggctcctcccatgggtatgtcggacgccctcctccaaccttccaacctcaggaagaggcgtgtgctctgagtaaccctcccagttacttctcgctttgtttcggttcggttttggttttttgagacagagtttcgctcttgttgcccaggctggagtgcaatggcgtgatctcggctccctgcaacctctgctgcctcctgggttcaatcgattctcctgcctccgcctcccgagtagctgggattacaggcgtgcaccaccacgcccggctcatgtcgtgtttttagtggagacagggtttcaccatgttggctaggctggttttgagcccctgacctcaggtgttccacccgcctgggcctctcaaagtgctaggattacaggcgtgagccaccgtgcccagcctctcccagttacttcttaaatacggcagccctgcatttcaaccaagtgtgcagacagaccttgtttgggagacccgggacccgtgcctacctatttccctttattgtctcttttagcttcactaagagcctggtgttctcacgggcgagtcttgcttgtgttgccaatttgctatttctaagagcaggcaaattttgccacaggttactttagcagcagcagggcgagaaaagatcatttcagtattcacagcgggtttccttgcgctcagaatgtttctgcctagatgagaagctgatatatacaatttaaaattcacagggcacaggagactgaactactgcgaagatatattctattaaatattttttcaatatctaatagcaaatacttaaaattcggaactactatttatgcagcagataatttctttagctcgaccatttgataaaaacatggccctatctcagtcagtctaagaataataggaaccaacctgtattccgacaaaattaggtttattgacccaatgcaatgaaggagactaaacactagaggaaaaaaggttattttaggtttctaggaagagtggagcttagacgcaggtctggtctgcaaagtgaacccagggtgctatttctttggaaacaataaagttaagataaatgtggactgttgcatccccaagccccttatctgggacttctcaccagaagtgggaattgaggttgcttctctgcttcaattaagcaactaagatcctgcaggcaagagtgagatgttttattcttactgatataattttaaacagcaagctcactgattgtctttgatattagagaagaaagtttctcagtgaatctatagtcactcaaagaaggacgttaccatgacactttacaacagcaacgtccctgggagaaatgtcatttcctgttcactttgcagttggcttatctgtgtctgctgtttcagcctgatgaatgttgggcagatatttactttctcagtccaaggcaagttttattttcttcatattcagaatgaaatatttcatggagattaaaaaacacttgcaagatacacgtgacttttatttaaaatctatctagagtccacagaaaaaaactgctgatcttcaaaacatagacatttctgggctatgtggtcgataaccacctgctgcctcttttcctcttctccaaagtacctggcataggttgcattttttgctataaacataacatacttttcagtcttacaaaatttaagcccacaaaatatctggtagggcaactagaaaagctgttttctctgggaatctaaaaagttattgagaaaataatagagtggtcggtttaactagaagtgaggcatgcttccaaaggcagaaattccgaaatccctgttgggtttgagcagcacctgatctacagctatcattttatcagtgatggtggcctcctgggagcttctgctgggttgagtaacagagccagactctgctggggtttacctggagtgtatgatggcaacactctgaaattccattaaaatggaacaggatcacttcgcagtctcaatttcataggtcatattctgccgtgggatattcataaggatcacacattggctgcagatagggaaatactgtcactgaggtgaattcatttcttttagcacttgcctcagacgaactgcttccaaataaaagctgggaggaattaataccatatgtatatgacagcctcaatttgtttccctgaaaaacgttctgcagatatgcttaagaacctcatttaggaaagcacatgtaatagagaaagattacattttaaatatccattttcctggactgtttgtgctaggtttatagaagatgggcattttcattataaggcagttgtcaatgtaactccttgtgtacttatttcatttccccagtgctgtagaatctagagttttatgaatttgtatttttaaaggatctttattttctcaactctattgcaaaattttatattaaaattatcttaattttatacaaatccttcttttagccacatatgcaatctttatatttattcatagtctgatatatcattaataattaaacctttgagcaaattttattgtgaaaacatttgctctatataatcctcggaagacttatccattttggccataaagagccttagataataaactttctctagggaatggaactgtaattatttttctgtgttcaaactcattactttttccttcctactatgtatatatttttgtaggtaggtatttattatggcttgttatgtttgaacaacttaaactttttggtagaagcatgctgacctagaaacaagaggagggaaaatgccaatatgttttcctttgaataattcaatgtgaaaggcaaagaaagccaactcaatcctgaaggtattttagtctttctttttttagacctagaacacaggtgcagataatattttttgaacacttcaaagtcttcataattcctttaggttgtattttagcttgctcaaaatgaagcaactttttcctgctaaatgaaagcattctctttggattgtgaacagtgttgttgattaaaacccctggggttggaaatgcatctctgtggagtgtaagtgctcggcttggtctatttttagctctgctttgtagttagatgtccagggttaaagtggaaactatggagagttacatgtgctcagggcttggctgaccttagtgagtcttaggaacaatgactagtttactgtcagtgcgcttgcagtacagatcagttaccaattgtgttctgagccacgagctataaagtaaattctggatggcttactctaaatgcctttgttcttggtcacagtgggaaaaataaagaaaataatttaggaaaacaaactcttaaaatgacagattactgtttcatgctaataataacaaaatatcatcaggattaaaggagcagtattacttatgaccatgttgcaaccattaggcaagggttcttaacctctgtccatgaatggtttcagtagagtcttggatgatctgaaattatatgcaaaattatgcacagatgagaatttttctggagagagggactgtagttttcatcggattttcaaggagctccgtgactcaacaaaggtcagaaccattgctctagaaagtctaaaaatgaataacagagagtctagtgtatgacctgaggacctctttcctaatgccaatgttataaggacttgggatgaaataaggcagatgtttacagaaaaggtggtattatggaaagcagggaccttccattcttgcaagtaagctggatcatacattaggatgaaaataatttaaaaagaatgttttcttattcttctaagtagagtgaataacttacaagaatgaatagcttacaaaaaccagagaacagcacagcaggtttcttaggttgtgggatgatttagagttgttcctcaaccttccatggtgacagtagacatttagttgtcttattctaaacagattaaaattcagcctatatgacgtaattcagcattgcattctctataccactgagtctttacaacaaccctgagcagtagaaatttttatcttcattttataaatgagaaaattggaaaccaaggagattaaatgacttttcttcattacactagaaagtagcagagtagttatttgaaccctcgtcatacccaggtccccaccctttccacgggcacccaatgccagttacagtcagcaactccccttgatcatacaccaccgggttttccttgaagcatcaatatgtagtttttgcattgtgcttcctttgatttagccttcttctagagaagctattgaataccaaaataaccaagatttacagcagggaacagcagatggaaggacacaaattctaacaaagaaaacccaaggagtgtccatgaatgccaagcctgggaccttacagacactttaacccactatttagaatcagacatagatatttgcaaaggactctaagagagcagtttggggatgaaaacactgaggcttgagtgactttccctgggcaccctaactttaaaccatgcccctcacctacccctatgtcacattgatcaaccacccccactcccacgtgtcacccagattataacctcttgaaactactagagttggtgaagaccacactaacattcaaagctgttataattcagacaaaagataccaatgctaaaaatagagacgaccaaacacagcagagagtgcagagaacttgaaagcttgttccatctcctaccccaatatcctttcaaaatgtgttaccaaagaaatctgccttgtggacacttttgtgtcctaacctcagctatgagctgtagattcatgtcattttctacatatctatttctgtaaaatgaggaaaatgactgtccctcatgttgtgaggtcgaaaagagataatcatgtaagatgttgagtgtggtggctggcacagggggaacacccagtgaggtttaggcattatgagtcattcattcaataaatatttactgagcgctaagcactgctctaggtgcttgggataaattaccaagcacattgtattgaatctattatattaagtagaattatattttataccagaaggtaatacatgttatagaaacaataagaaacagagcagggtaagagagatcagggacatgggccaagagtgcaggttagaattttcaagagggcagtcaggccttgttgagaaggtgatatctgagcaaagaagtgaagtagctcagagaggtagccatgaggttatctgggtaaaggtgcaccaggcatcagggacagccactgccaggccttccagcacagaacagcatcgaggcccatgcaagggaatgggggagtgatggatagtgcaggtggagaggatgtcagaaaggtgatgggttgggcaggactgatcatggagggcctgtgggccattgaagggagttgatattctgagttaaagaaggaatccatgacagttttgagcagaatagcgacatgctctgactcagtggtaacagcatcactgtgactgttgcagaagcaagttcccttgttaggaggctagtgctgtagtccagccagggccagatgtgcagtaagagcggatgtgcgagcagtggccagatgtgaggatctactggtcatggctgagttctgaattccgtcagatttctcccagagttcctcagcacccttagccagggagttttgaggctgtgaaatggtctgtggagattttgcgcatacaatgaatcttctgagactctctttaggtggtatgatgatagtaaaaccattcacttgttccccattttcccagattccctctacatcgtgtcaaagaaatgccttattcttttgttagtgtttttctggtatttaataggaaaagcaccttgaaataaccatagttgtatggagactcaaatccatctggagactgaagtgactgaatctgaataataaaaaatattgagccaattgactgttaccggaaatgaaatttgcttaggaagctgctgatagtctgggcacagtggctcatgcctgtaatcccaacacttgaggaggccaaggcaggaggattgctggagcccaggagtttcagaccagcctgggcaaaatagtgaaaccttgtctctattgttgctgatatatcaaggttttactttttttcctttagaaacgattttattgcttcttctctaaataaaattttaattattatatataagaaaaaagcatcatagttcatgggtaacaaaaatcaatacaatattctaaggtttgtcttccagtatttaaataccaacaaaatgatgagccacattatttcctgaacggtagaagttcagagggaaatatctatgaaagcagaaaagccagagagttactttgtttaaaaggctgttgcattatggtttttttttaatagatgggatcttgccctgttgcccaggctggagtgcagtggtgcgatctcagctcactgcaacctccacctcctgggctcaggcagatcctcttggctcagtcctctcagcccgcaagtagctggaactataggcgcgtgccactatgcctagttaatttttgtgttttttgtagagacggggtttcaccatgttgctcaggctggtctcaaactcccgagctagctcggacaatccacccaccttggcatcccaaagtgctgggattacaggtgtgtgccaccgtgcctggcctgttgcattatgttctgaatcccaaagaccaaccctaaatccaaggagaatggtcctttctatgtatcagcctcctgctccaacttcctcagctgtaaacacagggagagagagctaggattctcactcctggtaacaacaggttcacataattggcaatttatagatccatagaactgtggaatgttaaagcaagaaaggaccaaaagttcatataatttaagcccctcctttcatagatgtgtagactgaggcccagaaagatgtggttccttctttgcctgctgtgcttgactcttttaccaggctctcatgcagcctaaatcaagttgagatggcaccagatatacccagaatggcatagtcttccctaggcaggtgaatcatgctgtgagaaggcatgtccttttcctagagtagagcagagtagaatgagtcagccagaggcggaggaagggcaaagctgctacctccctgggctcagaggtgaaacatttgctctgtccctgcaggcccttggcctccatagtgtcggcactggccaggtagtggggtgtaactgagcttccacagagagacctctggactctggaagcccaagggtgcctttgcaacaggcttgaggtttcccacagccatcttttagatgaaacaagaaagcaagagtaaggtaactttcgtgcaatgtctagtcaatcccagtgaccatcccaaagtagagtggatattggtgtctgggctgctttataaataagttaataagacctgctttgacaaaccctggacacctcagttcacaaagaaacaaccttagacttagtaaggcatctcctgatactattgtcaagtgtctttatactataatgtctaggaaatatggggttaaactcttttactcttgcttaaaaactataatgtagtccgattaaattcacttatggaatagtcagaagtgaataacaactgaaggatgtatatagacaagaaccataagagatttaattctctcagagttttacacatccaccttttctagaacacatgaatattctacattcctagggcatttgtttttatatcatggctatacactaactgtgtaaagttactgaaaaagcaaggaaaatgttacatatcaatggaaatttaaatcatggaaaaaataaagcaataaattaaatgaaaaaattgcggttatattcctatttaaatagttttttttaaaaaaaactgaaagtgagatatggctaagagtaaaatgaagagaagagattagtgtaagataaataatgcaaaaaaaattaaaatccaagggaaggctatttattttgacatcataatatttattatgacgctacctgtcagtaaatttcaaggatcatgtcgatctaactaaattcatgtttgtaccataagaaactttttctgaaaagtgtattagcaaaaagaggactcttcagctttctacttgtccgcgaactttgatgttctcctgaaacctccatgtgtgtcaagattgggaaatgggagaatcaagaatcagtaggtgttaggccaccgggattgcctgtatcaaaggaggagcacaaaaccaagctgttctcaatcaaaagtagatccaaaacaacgttttcacaaaagtccaaagaaaagtatcatttttcaggttttgcgaagaggaaattgtggcgaacagaaaattggagagtagaaaagagaatgcaaattcccagcgactctgcacagggtcctaaagatgagagatgtaattcagatgctgaagccctgcggaggagcagctaactggagcaaagacagcccagaagaggcccagaaaaagctgacccacagtttaaaaacatggcctctttctctcttccagtaaacggctgagcatttcgcatatatgtgaacagtacggagctgtaaatatatgtaaagatgaagtttttaaaggaacatttttagaatagaaaaaatgaattcagctcttttgtggcctttcagtaaagcctaatgaaaacacatagataagtcagcattaaaaacagagcttttcatcctgggatgtcctacccatctttgaatgtccagctcttccacgaaggattccctgataaccccagacagaagctcactctcgagtgtgtgaattcacattttgtttgcactggcctttgtggttactggccttccttctttgtgttcttccatcctttcttccttgattgacataatatatttgctcccttactagaccgtaaagctctcagaagacaagggttttacatttatccttgtatcctactcctaccccagtgccaaacacagtattttgcacacagtagatactcaataattttttttgtcaaataaatgaaattgctacagaatgttaagaaataaacccgtgaggatttcagtggtattataacgtgttatatgtatatacattgtgaacgattgaacaaggagattgttcaataatgtttgaaataaactttctcgtgcactttctgaaataccagctgggttgtatgctaagtttacatttaactctataagaaactacccagtggttttccaaagtggttgtactgttttaccttcccacaaaaatgtatggggattctagtttatccacatccttgtcaacatttattgttttctgtcttatttattatagccattataatgtgtgtgtaatagagttttgttgtggttttgatttgcatttgcttaatgaccaattttgttaaccatcttttttgcatttagtagccatttctgtatcttctttagtgaaatgcctattcaaatgttttgcccattttttaattggatttttttcttattgagttgtcatagttatttaaatggtttggatacaagtcctttattagatatgtttgcaaatattttctcatattctgtgccttgtcttttccttctctttactgcagtgtctttccaaaaccagaagtttttaattttgatgaagttcagttcaacaattttgttcctttcaaatcatgcttttggtattttatctaagaactctttgattaagtcaacaccttagggagtttctctgatcttttcttctaagagttttaccatttcagcacttatatttagaactgtgatgcattttgaagtaactttttgtgtataatattgagtaaagctctaaattcgtcctttcacatatgggtttacagtacaactgattgccccagcaccatttgttataaagattatcccttcccccattaaatttcttgatacctttatcaaaaatcacttgaccataaatgtagaggtttatttctggactatcaattctgttcccttaatctatatgcttgttcttataccagtaccatagtgctactgttgctttataaaaagtttgaaactggtgaatgtaagtcctcttagttcttcttttacaatattgtttgcctatgtcgttccttcatatttccatataaattttagaatcaccttgtcaatttctacaaagaacaaagtctactgggattttgattaggatcatgttgaatctgtagatcaattttgaaaaaaagtatcattttaataatgttgagttttccattccatgaacatgaaatacttatttatttagttgttctttcacttctcataataatgttttgtaattgtcaatgtacaagtgttatacttctttgttaaagttattccttagtattttattctctttgatgctattgtgaatggagttgtcttaatttaatttttggattattcattgctagtatatggaaatataattgatttttgtgttttgattttatatcctatgaccttgctgaactcatttattagtaccaacaatttttgtgtgtattttttaggattttctacacataggattatatcatctgtaacaaaaggtagatttacatcttttcaatttttaaaaagttaattacccagactagaacctccactacaatgttgaacagaagtggcaagagcagatcattgccttgtttcagtcttaagaggaaagcatttggtttttaccattaagtatgacattaggtgtagatttttcgtagatggcctttatcagtttaaggaagttcccttctgtttctattctattgagagttattaataagaatgctgacttttgtcaaatgctttttctgcatctattgagatgataatatggtttttgctttttattctattaatatggtatattacactgactgattttcatatgttaaatcaaccttgcatttctggggtaatcttcacttggttttatatgttgctggattccatttcttaatattttatgaaggatttttgcgtctctatgatggatattggtctgtagtttccttttattataacgtctttgtttgctttgatatcatgtaatactgaccttgtagaatgagttggaaagtgttcccttctctatttttggaaaaaaaaaaaaagagaaatgattggtattatttctttaagtatttgatagacttcattagcgaagctatttgggcatggacttttcgttgtaggaaaattttaaattaccaattcgagttctttacttgttattgatctcttcagattttgtaattttttctcaagttagccttagtaatttgagtctttataggaattttcctattttgtctaagttgtctaatttgttggcataaaggcatctacattatttctttgtgagcctcttaattcttataaggttgttagtgatgtctcctctttcattcttgattttagtaatttgtgtcttctattatttgtagtcaatttagcaaaagccttactaattgtcatgatcttttcaaagaaccaacttttgtttcattaattttattgtttttctgttttctttttcatttatttcccctctagtcttcattatattgcccttctgcttgttttgtgtttagttttatctttttctagctacttatgatggaagcttaaattattagtttgagatcttcttttctaatataaacacttaaagctatatatgtccctctaagtactgctttagctgtatcccatatattttaataagttgtgtttttgtttttatatagttcgaagtattttctaatttcctttgtgatttcttcttgaccaataggttatttaaaagtatgttgttagtttccttatatttgagaattttctaaatttttttctattgtagattattgtttaattcttctgttatctggggatatatttcccatgattctagctcttttaaattgattgagattgttttgtggactaccatatgaaccctccttgagaatgttgaaaagagtaagtattctgtcgtccttgggtaaagtactcaagaaagatcagtcacgtcaaggtgattgatagtgttttgcaagtattctatgttcctgatgattttttaaatctagttgttctatcagttattgagagtggaatattgaagtctccaactattatttttcagttttatatttctttcaattctgtcatttttgctttatgtattttggggatctgttgttaggtgtatatacatttacaattatgcttttcttagaaattgaccattttatcatatgaaatattcctctttgtctctaataatatttcttgatgtaaagtatattatgttttatattactatagcttaccatttgcatggtatatattttttatccttttactaacaaatgtgtctttaaatttagggtgtgcctcttgtggcagcatataagtggattagttgaatctgtatttttccattcagtctgacagcctctgcctgttccttggagttttttattccatttacgtttgctaaaattactgatatggttgtatttatgtctgccactttttaaagtatatctcattatctctttaattactcctttattgccttattttgtattaaatggacctttttagtgtattgttttaattcttttgtttcttgactatattctttgagctattttcctagggattgccttaggaattacaatatacatattaacttatttctatctacttcagataatatatactcactgaataccagtaaacatagaaactttcctctaatatagcttcatttccttctccctcctttgcactgttgtcaagtatattacaactatgaatgttgtaaacccaacaacacaatgcaataagtattttatacaatattatatcttttaaagaatttaagagaagcctgggtgcagtggcttacatgtgcaattccagcactttcagaggccgaggtgggtgactcacttgagctcaagagtttgagaccagcctgggcagcatggtgaaatcccagttctacaaaaaatacagaaattagctgggcatggtgatgtgtgcctgtagtcccaactacttgagaggctgaggtgggaggatggcttgagcccgggagatcgaggttatagttatgaccacgccattgcactccagcctgggtgacagagcaagactctgtctcaaaaaaaaaaaaaagaatttaatagaatatatatgtaaaaatttacatacatatatgtgtataagcttatatacgtataaatttatatacatatgtgtgtataaacttatatacatatatgtgcatgtacatgtgtgtatgtgtgtatgtacacacactgtcttttgtatttacccaattatttactgtctggttgttctccatcttttcgtgtgggtttaaattacaattaaattacctttagtctttttttctttttttttttgagacggagtctcactctgtcgccagggctggagtgcagtgtggcacgatcttggctcactgcaagctctgcctcccaggttcaagcaattctcctgcctcagcctcctgagtagctgggattacaggagtgcaccaccatgcccggctaatttttgtatttttagtagaggcagggttccaccatgttggacaggctggtctcaaactcctgacctcaagtgatgcacccccttcagcctcccaaagtgctaggattacaggcatgagccactgcgcccggccagatatagaattcttgattaacattgtttttcagcacttaaatatgtcatgtcggtgccatttttcctgatgagaagtctaccattaacagtattattgttcccctgtgtgtaaagaatcattttactcttgatgctttcaaggtttctctctggctttgactttcaacagtttgacttcgatatttccaggtctaagtatctttttctgtgttattctacttgggttttttgagcatcttggatccatagattaatattttcatcaaattttggaagctttagtctattatttcttcaaatatattttcctgccctttctctctctcttccctttctggcactgccattactcatatgttagtatgtttgacattgtctcacacgtttctgaggctcttttaatttttctttattcttttatctctctttgctttagaatgggtaatttctattttcaactttattgattatttcttcccttatctaacatctgctgttgagtccctctaagaaattttcatttgttatcgtactttttaactccagagtgtcctttgattttattttataatttatatttctttgttgacattctctatttgttgagtcactgttgtaatacattcctttaactctttaaacatggtttccttcagtttttgaacatatttataattgctgctttgaagtctttgtctgctaaacccaacatcaaggacaacccagagacaatttttgcttactactattttcccattggtgtgggttacattttcctatttcttggcatgtctcataacttttattgttgttaaaaatgggacatgtcagataatatattgttacaattctgaattctgaattttcctcagagtgtgttgttgctgtattttggttttgttttttgttttttgggtttttttgtttttgtttttgtttttgttttcagctggagtctcactctgttgcccagtctggagtgcagtggtgtgatctcagttttgtttaataataatttggctggacatgcttgtagaatctccttaactgctgtgtggctgcaggtgtctctgctcagctttgttttgttttttaaattcttgttctcatttttaagccggaattcctaggaatcacactgtgtttgcatagattaatggtggtcagacattgtgcccaaacagctcaagacagtaaatcttccaccctctggcagtagatctgagtgtgtgttagggagcacagctaaagtgtgcaggtaatttttttttttttgagacggagtctcactctgtcacccaggctggagtgcagtggcacgatctcagctcgctgcaacctccacctcccgggttcaagtgattctcctgcctcagcctctagagtagctgggactataggcatgtgccaccatgcctagctaatttttgtatttttagtagagacagggtttcaccatgttgaccaggatggtcttgatttcttgacctcgtgatccacccaccttggcctcccaaagtgctgggattacaggtgtgagccaccgtgcccagccggtgtgcaggtaatttttacgtaaatctggttttgcttaattccaggctctcttgcctgtcctctgcacatgtgcacaggcttgcagtcaaccaatgatgtgtggaaaacttggccctctccaatttttcccacacatatatgtatggagagcttatgaaggaccctgtgactaccttattttccagatcttcctggtaaatttctggctgatctaccaatctgctgcttgccccaagcctgactgtaacctcaggctagctgagctgctggttttcccttgtttgtttgccacctagattattgctactgttattcacagtgctgctggatgtggggttttatcacattgttccccaaatcaagtcagtcttccctggctgctccttttcatgccttttctcatcttggttgaactaccttatggactaagctgggggtaagggatgggagaagcctaggcaggaatgacaccctgctcatacgtgaagttcagttgtttgtttgttctatgaatagcgaattctcagtgtagtgtacgcctttgattgattttcagagccctgattggttatttttgacaatgtgttatatatcatcactgctttggggagaggaactgaggaactactccttccaccatactggaagtcccacctctgcatcagtcatttttaatcattcctcagctgattctgatgtgaaaccagggttgagaatccttgagctagggttttactacaggagaataaatctttttttttttttttctttttttgagacagagtctccctctgtcacccaggctggagggcagtggtgcgatcttggctcactgcaacctccctcttccgggttgaagcagttctctgccacagcctccttagtagctgggattacaggcgcccgccaccacgcccagctaagttttgtatttttagtagagacggggtttcaccatcttggccaggctggtcgtgaactcctgacctcctgatccacccacctcggcctcccaaagtgctgagattacaggtgtaagccactgcgcctggccataaatctttatttcacttcattcagtaaacatttattgaattatgtcaggcactgggcacagtgctgagaatataaaaatcactgagaccatccctcttctggagtagtcacaggcagtgggaaagacagagaaaccaataatgcagcctaaccctgaacacataaggatgggtgatgctggctttggtggcacagtcagcggagacaatgcccacagttcatcctttctctgaaacgtgctgataggctgtcagaatgttttcagaaaataacatagccattaagcagatctatacttcccataagcatgaatacatttattcatcctagtgaacctggaaaaatttccccaaattatatagtgattataaacataactttaaggggccagcattttactttatgttcagtttaatgagtttttttttgtgctttatttttagctgtaactgatgatttcataacttcaatttaggtgaataaattcagggagagcaaatcaacatcaaagtcatcatgggcagtatgacatggttttatggtctgcaaactggggagtccacaaaggcaagccattggagtatagaacgaaatagtaacatttctttttctttttctttttcttttttgagatggagtctcgctctgtcacccaggccagagtgcagtggtgcgatctcggctcactgcaagctctgcctcccaggttcacgccattctcctgcctcagcctcccgagtagctgggaccacaggcgcctgccaccatgcccagctaattttttgtatttttagtaaagacggggtttcaccatgttagctaggatggtctcgatctcctgacctcgtgatccgcccgccttggcctcccaacgtgctgggattacaggcgtgagccaccgcgcccagccttaacacttctttttttaaaaaaaatcaagtgtggtctttagtatttttctattgattgaatgtttcataaaattagactatttatacagtagtatatggatagaacttataaataaacatatataggtagtatgctcccaatttttttaaattgagagtacttgatcataaaggttggagatcccagcactttgggaggccaaggcaggcggatcacctgagatcaggagtttgagaccagcctggccaacatggcgaaactctgtctctactaaaacgtacaaaaattagctggccatggtggcgtgcgcctgtaatcccagctattcaggaggctgaggcaggagaattgtttgaactcgggaggcagaggttgcagtgagccgagatcgcgccattgcactccagcctgggtgacagagtgagactccgtctcaaaaaaaaaaaaaaaaaaggaagttggagatgactggtatagtgtaaagaacactaacctgaaaatcaagaagagatgaatgctagtcccagttcaccaccaactcactgtgtgagcatgggtgagttacaaacactctccaggctttgctttccacatctgtcaaatcaagggcctgatataaatatccccgagtcctctttcagctctgagattctataaatggttttgttcttgcttttcctgttacgaagttgaacaagtaggtggttatgatattttctgttcagtatttgaattaaatgcaggtgtaagtctacttctgagttcctggaatatttccggagagtgcattttgtaccttggctacatctcttccctgtggtgctaccagtcatagatgtatgtgataatgtcctacacaccaggatatgtatttaaaatctgttaactgtagacatattaacaaggactagcataattggtgggggagtacaaaaagatgtacctagatatagatacagttacaggctcatagatacctgcacacacacacaattaacccttgccttttgcttaatttgattgctttcatcaaaattcagaaagcttcaagatttaagctaagtacattaaaaaacactacatgtagttttaataggtaaagactgacaccagtccatacatattgtttggtatctactcagaaactgagttgttggcttattttcaaaatttaaatacataaaagcccaaggggttagcaatcccttatttaactctttgatttaagatcaaagaaatttaaaatctacatattcgatgtaactcctttagaaacattattcaactttaaaatttgatagagtaagatgttggacttcagagttcatggatcatgacaaaatagactatggatggtttttcttaagataattatgcttattataacatagtcactttctttaaagtttgtgtctctctgatttagttttgtttggtagcctcaatacataaacgtcttagcattactaaatcatcagtttgcattgtattttaacacctaattcttcaatactctttattagaaatcaaaggcttgaagaaatattagcataataaaagtgaagatcttgcgttttctaagcagtactatataacacataacatcataatgctttttaaaaattcttctgttccaaatgaaatatgaagtggaagctgatgaaagtgccatgagtctttagcataaagttcaactattaaaaatcagctcttacattggaaggacataaagaaaaaaaaaagcagcgcctgtgatttacttgtgagaatggaatactcatattatggcacattctatgtaataaatgcattattttaagaatttgtcttaaaggataaatgacagaaaaaggagcaatgcaatgaaaagaataacaaatcatagctattttgatgtaaataaatgtcaaaaaataatgagctcatgagactatgactgtggccactagaatggaagtaaagagagaaaagcaaaagcagaaaaacaggagagaaattagaaatccaactgttctggaaacaggggaaaaaatgaaactcttaagccccataagtatgttattttggatgctaatggaataaagaggtgagggaaaataccactttaaacttagacctgtataagcacagcctgtactttgtgacctgccggggtatagaatgcagtcgttttgctgctgcccaggacagctggccaggaacaaatgtcaccctggcttccagtttgtaaccaatccacaagcttaaattcaaagttctaacctttagttttaatgctcatcatagaaaaagagatggatattccccactgggggaggtggtagatagtggggaaggaagagtttggccatttccatgcgacctccctggaggattcaaggggccgctgcctgccctgcatgtcaaagtcctgtgctacttgttttctcgcatcgtcatatatccattttgtaccatgtatgtgcttggcctctcttctgcttttgattaggtaatcccttttgctttttcaaatgattttccaagattaggaaatggtcaaggtttggatggtttggaaggtttttctatttcaactgggcagcttggcttttcccatgccacaatacccctgttcaccttgtctttagagattctctagacgggggctcttaaaaaatacattaacttttttttttttaagaatagtttcaaatttacaaaatgattacaaggatagtgcagagggttcccatacagatccctattgttaacatctttcttaatgtgtagatcagggacttttagccccaagttcatggattgacttcagggagttcatgaactcctgaagtttatgccaaattgtttatgtttgtatgaaaatgcatttcatttcattcaagagctatataaattaagactattcttttcatttcatcagtccttttcctctgctatctctgctctcatgttttccacttccctagtcaattttttggtttattagaacactacctgcctccaagtgcacatttgtaccagtgtgcacaggaagccagaactgaccaaaggcttccttatcgcacccgtgtgcaccactgagtcaatcggcatcgtgtgttcccataaaatatgttaactctatcatttaataagccccacgtcccttcaaaggcaggagttgcctataatacataaaggtctcagtgtaaaccaagggtcctacatcaggatggacctgtctagaaaagtatgcattttaaataagctcccaaaagaatttggatgcaccatgtatcaaaccatttatatagactgcctaaatttccaacatgacattaacacaaaagggcatttagaactatcataaaaacatcactcttttcccttgaaactttaagtgggggaaaaagccatgcaattactgtagccataaagttattatcactatttttcttttctgtctatatagaatccattatttgaaatctttctaactctactttaattctaaagataagagataattgtaacattagagatctaggatttggtaaaatttctcccaagttaaaacttcctctatcgtattttgaatattgtaaatgcctttttttgttactgtctgatgttaggtggtttatttcagacttacagattccagtctgctgttagatgattattcatccaagttgagccccaaaccaaagagagccaagcacagcctactgtctggagaagagaaagaaaatttgcccagtgactacatggtacccattttctcaggacggtgagtgtgctttttcttcctggctttaatttttaagaagtatatagtaagtgctataggaatggcagattatagtcataattgttgtggacagattatagaaatagcagctaacatttattgagcacttgttagattatagtaaaagcagctaaccttttattaagcacttactatatactgattcagatctgaggaagctgggaaccctgcactgagagagatgtgttaactgtgttaaaagggacttcctcttcagaaattttgccatcacgtaggatggttacatgacaaacaagaatgatcagaacttaatgctgcttataaaactagctggaatgggaagtggatcctgggatgcttgtgattggacaggacagccagagtaaaaagaaagcttcaaaaactacaaaatgttgggtgaatttttattattgtgtgtgtgtgtgtgtgtgtatatatatatatatgtatatgtacatatatatgtatatgtacatatacatatatatatgtatgtatatgtatatatatttatgtatttgagatagggtctcactctgttacccaggctggagtgcagtggcacaaacatagctcactgcagcctcaacctcccagactcaggcaatcctcctacctcagcctcccaagtagctgggtccacaggcacgagccaccacacccagctaatttttttaaaaaattatgtgtagtgatggggtctcactatatcgcccaggttggtcttgaactcctgggctcaagtgatcttccctgcttggcctcccaaagtgctggaattacaggcatgagccaccacacctggcctgggtgaacttttaaaaaaaaacccaagatgacacatttaggtagctgaaaaatatcttggttatcaatgtggttttaattattattcattgggggaaaaaatctcatcataatttgaatgccttgttcaatgggaaatagattgctatttactttgaggtaaacttcagacaaaataatcactaaatcacaagtctgtgtgatgccacttttctatctttattgcataaacattatttttgagcagtaataatatttaaaggaatcttgaaaggaaacttgtcctggacaccaagattaaagctcaacaggagctttctggttcatctcctatttatttctctttgaacagagagttattcccatagctcaggtgacactcaaagtgaggccatcctctaagagcaaatgtcatggaaaagtagatcctcttggaagtcaggaaataatttggttgtgattgatggtgacctacttctgttgcctgtgtttttctttccattgccctctgacagttcctttctgacttgtgtcagaggctaatgtcataattgctctgaacccaattaggaaggtaaagggataaataacattctatttttagctttttatttgatatctttgctatctctgatttttttaagtgaactttccagacaaacatgttttcactgctaagtatggatgcccagccttttgacctcttcacagtagcttaatgtaactcgcattccttataagagatggtaggctagagcggtaaaatcttttgtctccagtatttttcccactctgtttcaaaaaatcatttaaaaaccacatcagcttaacaccagcctacgtgacatgactccacctggcagggcacaaaatgaagcttcttactcctaacatcttctccctgctctgtccacaccaaactatttttctcttccgggccaatctcaagaagtgatcatttacaaatacactgtgataaaagaagacgtgaggccaggcacggtggctcatgcctgtaattccagcactttgggaggctgaggcgggcagatcacaatgtcaggagattgagaccatcctggctaacacggtgaaacccggtctctactaaaaatacaaaaaaattagccgggcgtggtggcgggcacctgtagtcccagctactcgggaggctgaggcaggaaaatcgcttaaacctgggaggcagaggttgcagtgagctgagatcacgccactgcactccagcctgggccacagagtgagaccccatctcaaaaagaaaaaaaaaaaagatgtgaagaaaaattgatcttctaggctttatttctagttctccattatatcttatatgatgtcatcacctatactctgttactgtgtcaaaaataacatttcacagtggttttggcagtattaacaatctgaggagaggatggaaaagaaatgaacatttgttgagtgtctattattatttgctgggactcacgcaaggtgctttatataaaccatcttgctaaattctccatacaaccctgcagagatattaatatatcaacgttttggacaaggaaatcatggcagagtgacttgctgaaagctgcatgcctgggaggtaaagaattgaaagtcccacgtaggcctggcgaatgcagtggacatgccctctgcactcacagtgtgcttctggaaaataccatttcctctgcatggcacctgaaatttccacttatattccaataaatcgagtaaactttgtgtcaacaagagatttttgaattgagactgtcagagattcgcagagtaccgggagattttaaatttatttttactttgtagtagtatacttttgtcaacatgttagcctcacagttttgcttttgtgtccacattatagaagggttatcactgataaatcctgacttttacttaaaggagaatatccctattgcctgggtctaacatactttttaactgtagttgagttctcgtgtgaaataattagttttttttcgaagtttagcttctttgtaaatggaaaaggcaaggagactatcacttcatttggccctctagagctgtgccaacatatccagtatcagtagtaatgagaacttaaacataaagttctcttacttggagcctggggcaagactagcactgaatatgatccatcattacatgaattgaaacagctcacaaagctcatttcacatctccctattgcatattgacttccatagagaattccaagcaaattctcctgatggtttgttttgtattcagttagtaattcattcatttcctatcttgttcaaaaaagaatgagaggtcattatgtgaggacactaagctaaaaatctttcatcttcttcctgccccccaaataataatggacatattactaacatccatagtagggattagcttattaatatttacggagagagaaaaaaacttaaaatttactcactacatttagtcagaaacaacgtggactcatctcgtctgccagatgttttaggaatagtccatgagaaaccccaatcttggcaaatgtggaatctcattcctcagcaagcagcatagatttagatgctaggaacttgctaacacaatggcagcatttgcttacattctgaagtaatcattcttagaatgcacgattctgtcttaagaggtctaaggagactcaatgtcaagagaatcttcgatgtaatcaatacactctctcacgaaacatttgagggggttaacaacaaaaggcattgaaatatgttaaaataattcaaatatttttaaacgacatgaataaatcacagcacagattctatcataaactgccacagtaggcattgcacttgggatgttgccactcccttactattgtcaattatgaataataacgagtcacatttataaacgtcaccacttccatcacaagtttgataatttcttagtatatagtataggtacacacatagtatatgcacacacaacatgtattatcttagaaagaaacccagtaggcataaggaacctcatgtaaattcagaacttattcatacctgtaacaactccaggcaatgcattacatcagcaaagtgacagaacccagatcaagctcctactcatgtatcagggtcacaggcacacaaactagatctcatttgacaatatagcttttctggaaaggaaccataatcttttattttaaacaaaatcatgtttaaacacactaagacaaccagtgagacgaccttggccaagttatctaacttatctgaacttcgttaccatatatttaaaacagaaataataatttatcttggccaggcacggtggatcatgcctgtaatcccagcactttgggaggccaaggctggtggatcacctcaggtcaggaattcgagaccagcctggccaacatggtgaaaccctgtctctactaaaattacaaaatattagccaggcatggtagcaggagcctgtaatcccagctccttgagaggctgaggcaggagaattgcttgaacaaggaggccaaggttgcagtgagctgagatcgcaccactgcactccagcctgggcaacaagagcgagactccatatcaaaaaaaaaaaaaaagtttatctcatagggtttgtaaggggatgaaacaagatagtgtatgtgaaaagcaccagggccatcataggtgttattattgttgttatttgttaaggtgaggaatacttctgtacatgaagtgtcagcttctgattcacctgctttttctatgtcggattttcttttggtgcaggatacagtgtctgagatgtggtactttgaacttagtaaaattactcaatcttatcactgccatccacaacatctacattttgccattgttgtgttttagtcaaaagcatgtcagtggaattactgatacggaagaagaaagaattaaagaagctgctgcttatatagcccagaggaatcttcttgctagtgaggaaggaatcacaacatctaaacagtccacggcatccaagcagaccacggcatctaagcagtccacggcatccaagcagtccacagcatccaagcagtccacggcatccaggcagtccacggcatccaggcagtctgtggtttccaaacaggccacatccgctcttcaacaggaagaaacttctgaaaagaagtcaaggaaagttgtgattcgagaaaaggcagaacgcctgtccctgaggaaaacagtaagaaaagacagtttaaagtaacttacaaaggtggaaatgcatgtcataaggggtgtgtgtgtgtgtgtgtgtgtgtgtagatatagattgatttgtttctttttttttttccttttgagatggagtctcactctgtcccccaggttggagtgcagtggcgcagtctcagctcactgcagcctccgcctcccggattcaagcgattcttctgcctcagcctcccaagtagctgggattacaggcacgtgccaccacacccagctaattttcgttgttgtttttttttttctggtagaggtggggtttcgccatgttggcaaggctggtcttgaactcgtgacctcaagtgatccacccacctcggcctccccaaatgttgggattataggtgtgagccactgcacccagctgatttgtttcaaatgaagaatatgtggtcttttggagaaacaaaacgtaagaaaacaaggagaaagacattaaaatattaatatgtaggtcaaagaaagcaaacaatagttttaaactccatggaattttaggttttaagaaaattaaagattttagagagccttaagaaatccaccttggagaagtaaaatatgatcaggtgtggcggctcacacctgtaatcccagttttgggaggccaaggcaggagaattacttgaggacaggagttcgagaccagcctagccaacatggtgaaacccctaaaatctctactaaaaatacaaaaattagccaggcatggtggtgcatgcctgtaatcccagctactcgggaggctgaggcacaagaatcgcatgaacctgggaggcagaggctgcagtgatgcaggttgcaccagtgcactccagtccgggccaaaaaaaaaaaaaaaaaaaagaaaaagaaatcaaagatgttgcttaagcttagaatgttaaatgtcaaataactacctctgttcttaaaagggagaagggagtgcattttctctacaaaaaattaagcttccaaatggaaaaataaaacttttgccttctacttgttattttagcaccaaaattcactttgatttattggtattttggtaatatgtttgtttgcatatttgttttttcagttagaagaaaccgagacatatcatgccaagctgaatgaagaccatcttctccatgctcctgagtttatcattaaacctcgctcccacacggtttgggagaaggagaatgtaaaattgcattgctccatagcaggctggccagaacctcgtgtcacgtggtatgttatctttatgaaagctaacagaattcattacaccaagttaagttcgcctctagtggaaacacacagaacaaccatatgcaagagtcaatgaagacatctacaagattgtataggtttttaaaagagtgaagaagggtaggcattgagatgaatttgtatgcatgggaagaaaaaacagtcttgcatatatacgctacatgataatactctataatcctattatacaaatggatctttattttatatgaagtattgcattttagtcaacatatgtaccaacataccaaatatatgtctataactcttacggatgataaaagttaggtaaaaatcagcttccagcaatgaactttacacaacatggcaggattttgtgatcagaagcaatgctgccttttacaaaactccctttaactaaaactcccatctctacccctcatgtgagctgaggcctcaatgtgcctttcttcctttctttctttctttttttctttcttctttcttttctttttctttctttctctcttttccttttttctttctttttctttatcttcctctttctttccttccttctttctctttctttctttctctctctcccttccttccttcctttccctttctttcttttctcttctttctttctctttctttctttctttctttctctttctttctttctctctctccttccttccttcctttccttccttccttctttctctctttctttcttcctttcttatttatttattttttttaccagagagcataagcaagttgcatcaatttgttttctgacaccaaacaaaagaaagaattggaaggcagatattacccaatatggggcatgagatattttctttccataaagaataagcactctttttcctccttcataatatatcctattgcaattgtcaatgactttttgatccctaacctgagaactttcctgtcacatgtcacaaatatctgccatagatggcagaagtatgaaaataattgagccaattaaaaaagatatttcagttttactctctggtgcaggtatttgcatgcttttttcttattttcaggagtggtggtaaatgcaccttaggttgcaatataaacactacatgaatgtcactgtcacccagagtgtctgcgtccttctcctttcttttctgttatttctaatgttgatcagatgcctgcctagcactgtggaggtagctgacaagataaacccaattaactctctaaggttattctttttttttttccttttttgagacagagtcccgccttgtcacccaggctggaatgcagtgatgtaatctcagctcactgcaacctctgcctcctgggttcaagcaattctcctgcctcagcctcccaagtagctgggaatacaggtgcataccaccacacctggctgatttttgtattttcagtagagacggggttttgccgtgttggccaggctggtctcgaactcctgacctcaggtgatttgcccacctcggcctcccaaagtgctgggactaccggagtgagccagcgctcctggcttctaaggttgttcttaaggagcacatggtgagtttttacttgtaatcttaatctgtctttgatgattttggatttacttacaatttttctatgtatgtaaactcttttcagggcttctgagtttgaaaaccaaagaataaaaatcaaagctggctatgaattatcagggcaaataatttatagatgagaactgtggaaacatatttctataaaaatgaagtttaaaaaaatcaatttacaagctttaaaatggaaaagtaagttagcaatcactctgcctttgcctgcccttctctgtgactatagagttgcacaatttggcctgttaaagggacatttcttcttaaaaaaccaattacttcccacctcaaaaaaaaaattccaaactttcctatagaaatgcacaaacaataacaaatttttggctgcaagaaatattagtaaaaatatttcttctttcatgaattaaaatgtatcaataataaatgaataattagaggcctttgttgaataaatgtgtttattacacagtttcctatctgtgttttcccactttaaaaaaattagaatttaagatgattatcaaaaggatacaaagtagcttctgggagataaacattcaattcctaagcatttatttattctgttaagtacacagcaactggaataaaaacccggccacataccgctgatggtgttattaagcaaaagtgatgtgatttcacgaaagcagagctgaacttcagagattagactccttacattgtgctctgttgatctggaaaaaaagtaattaaaaacaaaaacaaaaagaatggaaactctccggaaaaataggagatgaccaaactgtcaacccttcaaattccagttaaattcaaaaatagaaatactgtccatttccagtgatcctcactaacagagctaagaagcagtagagttgatccccaaaccctttacaggtggctttgaaatatctgcatcctttacatgtgaagtttatgtcctaggggctcatttcaaacaaaagggaagacacagagacaagcttcctctccagaagtactggatgagcctcctctggtccctgcacctccgttagtgctcttggagagaacaactcccttgagccccgtgcaaagcatcagtcctagtgacttcattctttatcgtacattctcccacgagggacagaccagagcatttcacagtctccttgccttgcaagctaagtggaaaataaatattaaaacaaacgaacaacaaggcttcagtgagctctgatctcgccactgcatcccagcctgggtaactgagctaaaaaaacaaaaaaacaaacaaacaaaaaaagaactgggagacaactaggaaaatagttaactatacttctgagagcaagagttgccctgggtaaagctgaaacttggacaatcagttagcagataactgatgactggaaatggcagtaaacagggtcagggtcaggttttgttggcatgaagctgatacaacttggagggcactctttacaaactaaataaataaattagcagtataagttaggacataaggtcttgcagggatttgggtagtgagagaccctgaaatttaagcttcatttgcttcaagttaaatccacctctgggagttgacttctggataggattagtatatattcctgggcatgtttttaaaaagtcattaactgggctgggccagctggctcacacctgtaatcccagcactttgggaggccgaggtgggcagatcacttgaggccaggagtttgagaccagcctggccaacatggagaaaacgtgtctctactaaaaatacaaaaattagccaggtgtgttggtgcatacctgtaatcccagctactcgggaggctgaggcacaagaatcacttgaatccaggaagcagaggttgcagtgagctgagatggcactactgcactccagcctgagcaatagagtgtgaccctgtctcaaaaaaaaaaaaaagagagagaacgaaaaatgattcactggagtgctaattgactttgcaccactggtacagagcatgaaatcttcaataagcagcctttcccttgaagacctgggaacccgcagcccaagcaacaaccaagattgttggtgataacattgctggcatttatacctttttggtatccaattgcagcttcctgggcctgacactgaggagaagtacaaagggaatattgagaatgcccttcctgaatatcagcaggtttattaaaggagtaaatttgtgatgatgcttcatataatcacactgcctccactcatagcagttatgtccttagccacatctttcaaaggcacgtgtggcgggcctgtctccggcagagccctttccaaagagggtttggctggacaccaaccaaccagtttccactggacaccttcactcatgggagttcctgaggcctaacaaatgatacaagcactcagcagccgctctccaaccaatcccacattactaaccaaatctattcatgtggaacctagaggttaccagagagcactgaataagggcacacacatccctcattaaagtcaggtgcagagacaggatgcagtaccgtcctattcccaactcgctctgacagcagcagggagcctgtctaagcactggcctcggtagaaaagttagttacaggccgggcgtggtggcccacgcctgtaatcccagcactttgggaggccgagtcgggcggatgacctgaggtcgggagtccgagaccagcctaaccaacatggagagaccctgtctctactaaaaatacaaaattagccgggtgtggtggagcatgcctgtaatcccagctactggggaggctgaggcaggagaatcgatggaacgcggaaggcggaggttgcggtgagctgagatcacgccactgcactccaggcagcctgggcaacaagagcgaaactctgtctcaaaaaaaaaaaaaaaaaaaaaaaaaaaaagaagaaagaaaagttagttgcagaggatgctgctgcacccctaccgtgaagctggccatcctgcaggaggactctgtcgacatagaagggaaaatacatatgtagtgaaaaaaattaaagttttaaaatttaatagggtacatttatgtaataacttgtataataagagtctttctgtttaaagggggaagaaaaaagcatttatgtttgtttttgttttatttgcataatgaaattctggaaggatatggaagaacccaagaaaagctattgaccctgagggggagccttgtcaaagggacaaaagttctaggaagttaccaggaagggttcactgtgcacccttagttctttctggttcttgaaccatgtaaacgtattacctagtcagattttaaacattatgtgaaatagtggagaaggaaaaagttttctttaaaaggagagaatagtgttaattgtatactttttattattattataatactttaagttctagggtacatgtgcacaacgtgcaggtttgttacatatgtatacatgtgccatgttggtgtactgcacccatcaactcgtcatttacattaggtatatctcccaatgctatccctccccctcccctcacctcatgacaggcatactttttaaagagcaggattcatttgggtttctggcctgaagcctagattgaatttgtccatggaaatcttgattgtagcctgcaggaagatcaggaaaactcattggagcaatgtgttggtatcagtgtgtacctgtcattcactcactcggcactcatgttttcatatctatatgttggacactggactagatcctcaagcaaagcatttataatacatgtttaaaattcttcagtttcagccaggcgcgagggctcacgcctgtaatcccagctctttaggaggccgagtcgggcggattacctgaggtccagagttcgagaccagcctggccaacatggtgaaactccatctgtactaaaagtacaaaaattagccgggtgtggtggcaggaacctgtagtaccagctacacaggaggctgaggcaggagaattgcttgaatctgggaggtggaagttgcagtgagtgagatcgcaccactgcgctacagcctgggggacagagcaagaccctgtctcaaaaaaaaaaaaaaaaaaaattattcagtttcacccaaaggtcgttgtcaaatagatacttaaagaaatgtgtcattaagcccattataataattcaaaacctaggaataaaatagttacaaaggcagagattcagaaaactcttctattctcacaaattatgagggtttgtaaatttcataatagaatcatgcattgagtttattttcaagattagaattattaatcacatattcaaatttagcagttactaccatattatcatagaaaaaacagcttatatttaaaatggttaacacaaattatttacaatttacaacagttttccaacataaggatttggagttttactttggatttttcttatttacttaattccaaaatctatcccaatgggatctctctctctctctcaatctctctcagatagtttttaaagtgggtctagagtgatttactcaaaacaggttggattataagcagcaatctcatttgtggtgagattcagtatattaaagatcatctttggccgggcgtggtggttcatgcctgtaatcccagcactttgggggccgaagcaggcagatcacctgaggtcaggagtttgagaccagcctggccaacatggtgaaagcccatgtctactaaaaatacaaaaagtagctggacgtggtggcacgctcctatagtcccagctacttgggaggctgaggcaggggaaccacttgaacccggaaggcggaggttgcagtgagcacagatcgtgccactgctcttcagcctgggtgacagagtaagtaagactccgtctcaaaaaaaaaaaaaaagatcatctcggtgtgcattatttgtgggtagaaaataatttttgtgaagtcttttgcttgatcatgctttacactgccaaagagcttttactgtgaccccatactataaactcggcccaacatccaaactgacatttgtctgggagaattgtgtgttttacacacataaaggaaatgtcactggaaaaacttatagtatactgaaagctcattagcaattcatagacattacataaaaatgataagggagatagtatacatctgaatattcacagggatttaagaaagcttttgatatgtaatcccagggtgtggattaacctccaaaattagccgatgactactcagcttggaatttcatgttctagaaataacaagctgtgaagtatatacagaacaggccccaaatccttcttttcttccctgacttaaagctaaagatagccagtctcaagtgactgcaaacctaaatgcctcactgggtggaattctttggagaatagaatcaaatacctttctgacttaatccttgaccaccgctttaaatgaagaatttctcacattggtatctggagctccagagaaaagactacaagctctgcagtcaaagtgatgtgtggtgtgtgtgtattttaaacccatttctcttgccatgtggtgataatagaaaagttgttagctggggaaaaggtattagggtgctaaattgagtagtaatggaaagaaaggatggtgaagcaactatgggagctgcaaaatagttttttattttatttttaaaaattcattttttacagtcatggagtcttgccatgttacccagctggtctcgaactcctggcctcaaacgatcctcctgcttcagcctcccaaagttctgggattacaggcatgaactgccactgctgacctgcagaatactttgtaatgaaaattttatagagatatgagcaatacttttgatccgaagccgaattgagtgtcactgagtcatttggtcaaacagcacatgtcacagccgttggtatcacagcgcttttcttaggcaaagaggaaccactgaaaaccctccagcacaagaaagagcagagccagagtgagcttgagtccagtgtgaaattacctaaaccaattatagaagaagagcatgccaattaacatgttctaccctgtacttcatctaaacggggaatgcgggagattagaagtggccagtggatttctttttccaggccatctctgatcagatagtcctgtctgctcgagccatgttgagacagctgtctgaagctgctggcaggaaatagcactgcatcaacttgcagggtcttctgtgtttggagaaggttatgttgctgcacctgccacacagctgcgattcttaagccagtcccaccctctccatttcacatctgagggaactgagactgtcaacttactttcttcgtgtgcatttatttaaaatcatccaactttgggaggctgaggcagggggatcgcttgagcccaggaatttgagaccaacttgagcaacatagtgagacctcatcgctatttatttaaaataaaatcatccatatcatgacatatatgcttgtcagaactctgttctctcagacaaaaaattatgaagctacaattaatctattgcattacgtgctaattctgttcaaccaaatttaaccaattctgagcgcctgctgtttgcccatgactcattcttcctcaggagtaggaatagaagtaaatgtggatcaggccaggcacagtggctcatggctgtaatcctagcattttgggaggccgaggtgggaggattgcttgagcccaggagtttaagaccagcataggcaacatagcaagagcctgtctctacaaaaaatagaaaaaattagctgagtgtggtggtgcacacttgtagtcccagctacttggtagtctgaggtgggaagattgctcgagcctgggaggtggaggttgcagggagctataatcacaccattgcactccagcatgggagacagagcgagacactgtctcaaaaaaaaaaagtaaatgtggatcagacacaatcccaacctcaaaggtttggcaacataatagaagagacacatatccaaccataattttgataaatgttatatttagtaacttgaagcaaggaaccctgatgcagagaggcaggaacgattcatactgtgtcatattttagggaagagtttattgaagaagttgcatttgatctgaatcttgaaggatgagttcgggttctgttatatggaggagagtgtttgtttgttttaagtgtagaaaatgaataacgtgctttagggacggaggggtgtatgtgtatgtgagagagagagctggggaaaggaaggagctgactgaagccagtattcttccttcctctccctttccatcatgttccctactcccaaacctccttatgatcgtgtccacaagtctgaagaaatgaaatgcagacagaacaattggaaaatggaagcatcatgtgggtcagcagccaggctgccggttcaaatccctcctctgctgttcctggctgtgtgactgggcaagttcctgaaacccccatgccttggtttcttcatctggaaaatgaggttaaaaacagcactatctcatacggtggttgtgagaactgaacttaccaatgtatgcataaagcgcttagagcattgcctggctcatagtcaattctctgtgtcagctatgttaatcagggttattgacgtcatctgtgcgtgcgaagtgggctgtctgaaagggaaacaagtgaaacccagttcctcttttgggcagaaaatggtttaagtagaaaagcctggtccagcaccatagccactggctactgagaacatgaggaagtggtgaagaatccaggcgccacgtacagacccagaagacagggtcccagggagaggcccgcctgcgtagtccactctccgagggctgtgaggcttaaccagatatggaacagtcagaaaaagggaggctttcagctcttacttgtcagaagtttcctttcatgatttatattataaattcttccaaggcaagagccatgtttgtttatgacattgaataaaacacttaaatataatgatcgttcaatacaatgatattgcaggccgagcatagtggctcacacctgtaatcccagcactttgggaggtcaaggcaggtggatgacctgaggtcaggggttcgagatcagcctgaccaacatggtgaaaccccatctgtactaaaaatacaaaaaactagccaggcgtagtggccggtgcctgtaatcccagctactggggaggctgaggcaggagaatcacttgaacccgggaggtggagtttgcagtgagccaagatgatgccattgcactccagcctgggcaacaagagtgaaactctgtctcaaataataataataataataataataataataataataataatgatattgcttctaacaacatgcaagaatgttagcaggaagaatgttttgctctcatcctacacagatagccagcaataaaacccccaacagaaagccttcctctctgttacatcaatagtggtcaactttttaaaaagcttatttatgtatttatttgttttatttatttttaaaaagcttatttgtttgtttgttttatttattttaagacacggtctcactctgttgcccaggctggagtgcagtggtgcgatcatagctcactgcagcctcagcctctcaggctcaagctattctcccactgcagcctccaaagtagttgggactacaggtttacactcagctaattttttgtagtttttgtagattcagggtcttgcttattgcccaggctggtcacaaactcctggcctcaagtgattcttccacttcagcctcccaaagtgctgggattacaggaattacatgcataagccaccatgcctggcctaaaaccttttaaattataatataacatgcacacaaaaagtgtgcatattatatactgcaaatttttttttttcgagatggagtctcactccgtcgcccaggctggagtgcagtggcacaatctcagctcactgcaacctccgcctcctgggttcaaacaattcttgtgcctgagcctcctgagtagctgggattacaggtgtgtgctaccatgcctggctaatttttagtattactagtagagatggtatttcaccacgttggccaggctggtctcaaactcctgacctcaagtgatttgcccgcctcggcttcccaaagactgcacacttttacaaatgaattgctttagtgaatttttgtagattgcacacacccatgtaactgacacccaaatcaataaacattattgacacccaagaagcctccttcttgcgtcccaacacactactgatttctagtagcattaattagttttttgtttttgtattctatataaaagcaatcattctgctgtgcactgttttgtaactggcttttttcggtaactatgttacatgatattcagccatattgctgtgaatcgtcaacatttttcatgtaagtttatagaggaggggaaagcacttcatcaagaagtgtgatgtattgctggtgcacttcacgtaagccaatatgatttacatttatttaatcgatgctgctgctaccctcagtgccctgtttacagatgttcctgcaagaacaagaattgtgtgtgtgtttaatcatgaagttgtttacacttcaacttacttcattttgtttccattctgttataggtataaaaaccaggtgccaataaatgtccatgcaaaccctggaaagtatattattgagagtcgatatgggatgcacactctggagattaatgggtaagagaacattagtgtccatgtgttgctcaccattgctcagggaggcttctcacccctgcagttaacagccactctccccacttcatcccaatgctgtgtgatcacactgagggacattcgtatacggtgcttctctgggtgcacacctgaaagtgatatgtatgactgatccttaccatacccacactacctcccaaagtgattttatatttggattcggtcaaagatgatgagaaaaaaaccaatttgcatgtttttatttatctttttatatacttgggaatttttcttagatgtaagtaagaaaaatatgttgcataaagaggcatttatattcagtaatcatttcagagtcccaaatcaatatcatcatcacagtctcttgtttttaataactaaaggccatggagatccgggtaggtggcattgaatgtgggctaaacttggagataatgttctttccttcagcttgccaggaaccatgggaaagtatgcactctgtcaatctgtgtatgtgaagcaggctagacattgagatgtttgagcttaaagtaaaatccaaagcaaaatttgaaaacgaaacctacatcaaaattcctaagttcccaaatgtttattttgcctcccaagatgattttgaaattcaaacctaattaggtcaatgaaaagctaaacaagttcccagaattttcagtttagataaaaccatgatgtgcctaagtgtcaaggtgaaatttataccattcattctcaggagacttatagccttctcctcagatcagaggagttggccaaatgatgctaggaccctgtgccatttgccaggcactgaccctgacccaaagtcaggtcagttctgccagtgggtggttctgctaaagcaacagtgagctatgtggttactttcaaaattaagtagttatgagaagggcaactgtgtttgccttgctggggttctattgatgtctgtaaaatttcagcaagaaaaaaaatttacacaaatgaaactaaaccccgagaaacaatgaagaacacgagaaactggtaatgataagacataaaacaacctgctttgaaaccttagcctcttcatctctccatgaaaccattctctccctaatggtccatttttataagaattccagtttctgtattataacttagaagaacatccaaatggcgcttcttgtgtgctgtgagctgaaattccaagtatggcctgaaccttagtggaaatgaagtgtaaataacttagatgagctttgaagctagaacacatagaccaacgtggctcagggaggttgtgggaatctacacggagggactgcttctttctcttccctatttcctggttgcccccagactgaaacccaccacaagggcaggacagcaggaaagccacgccctccagtgtgcctctgggtagttacttgctacaaaggtacacgcctgcacattttctcctcccaatgcaactttagacaagtaagcggatcacaatgctgttcactctataatttatgtgcctagcacttggttgacttttttttttgacattttaaatgaacccaggctagggtcacagtgaactataggtgttctctccccagtctatgctgctggcatgaaactgcagtagatcacttggactaggtaatatcccacaggtagctagatcagagacaaatagctgtaccaggagaaccaaagagccatgtgttagccactgatttgcagggggctgtgatagcaaagagttccttgatagaacagctagtaattacaaggattgtcactacgatggatattcatttccgtctgttctttcagatgtgattttgaagatacagctcagtaccgggcctcggcgatgaatgttaaaggagagctttcggcatatgcttcagttgtggtaaaaagtaggtttgctagatttgttttcttcaaagtgtgtgtgtgtttttaaaaatttcttcccatggttttaaaataaatcgatcacaaagcagttcacatgcgtttctgttttcttctctagggtataagggagagtttgatgagactcgcttccacgctggggcttccaccatgcccctcagctgtaagtttaaaaacacatttactaagtgtcacctctatgtaaaatatggcataataagttagcccataatgctgaaataaatgcatactatatataacatagtatatgctaggttggatgtagtaggtacctgtggttattttatttacttatttttttagattttttggttactgttctctttctgaatcgaattgctttgtgctggttttatgaaagcccagatatgatgggctaaaaatagcaaatgtttttacatctttctgggttaaactgcgaaagatcattatgcaaacctgggcagaacgacttaaccaaacacacacacacacacacacacacacacacacacacacacacacacgagtctggactatatcaaagcgctctttctcacccttaaatatccagatgggcatcacttccttgagaaagcaggtctgacccccactgccgcccctacaccctacccagtcagggttaggtgtcctgggtgaggccatggcacctcatcggagcgtcagtgaggctgtacactgttacctgttgtgtgtcagtctctctcactggtccatgagccacttgaaggcaaggttgggcctgccacagagtgggtattcaataatgaaatgaataaataaatgcattaagttataaagtacaatctaaaatgaagtctaaatatgattaaataaaaacctattaaaaatattctggtcagtagtaatttacaaatttgtgaatgtcagtcatttcatttacatcagaacttctatttatgagaagcaataaaagtaaaatctttatggttgttgaaataattatatacttacagtggtcagactaaaaaaggtagtcaagccctaatttggttttcaaacattaaaaaattagtggtagttttgaaaatggctgatagcagtttttcacctggctggttagcttgatgtctgtggctgacctgctccactgatttcatggaatggcttctcgtttaatatcccaagttgtgatcactggcatcagccccatgggtgagaagggatgactggtagagcaacagagaagcacatcccgaatcatgttcttctcccatctcttgatttatgttgagatagaatagttggggccaggcacggtggctcacgcctgtaatcccaacactttgcgaggcggaggtgggtggatcacctgaggtcaggagttcgagaccagcctggtgcaacatcatgaaaccctatctctactaaaaatacaaaaattagccaggcatggtggtgggcatctgtaatcccagctactcaggaggctgaggcaggagaatcgcttgaactggggaggcagaggttgcagtaagccgagatcacgccactgcattccagcctgggcaacagagtgagactccatctcaaaaaaaaaaagaatagttggaaattctgaacctatgacttgtctcccagtgtccccaggagtggcctattgatcacgtcacaatcctctgaatgtagcttgcccatctccacaactgtatcatcatccatgtttctccctttcctctcttctctgtcaaggcggggactgaaagcccaactcactctcacttctcttattgctaaatcttacagagcctcctctctgatgacccccgaattgaatgcagttgttcctaacagaaaacagagtgcttatattcacatatttggttaatatttactaagcacctgttatgtgctaggtaggggtttaggtgcttggaatgttggtaaatatcacagacaaagctctctgctctttttttctaatagttaacatttattgatcagttctgccagacaatgtactaagacttttttatacacattgattcatttaatgtttcccagaagcttatgaagtagttgcatttctatctgcgctatgccaatgaggaaacagtttagagaagaacacagagtggtagaatagggatgtgtaacctggtctttttaattctaaaccattatttcaaacaaggagtcaccaaacattttctgtaaaggactagactgtaaatattgtagactttgtgggccatatggtctctgtcacagccactcaactctgcctctgtaacacaaaagcagccgtaacagtaggagaatgaatgagcatggctgtgttccaataaaacctttatgaacgttgaaatttaaatttcctgtgacttttcacatcgcaaaatactgtacttctttttatttttttcaaccactaaaacatgcaaaaaccattcttaatggtctaaacaagagacatcctagatttgccccacagacttgccaacccctgccctaaaccatttttctcaggatagtaagtacatgtgataaaagattgaggacgtgacaacgaaatgatgtgttgtcttctggttgttaaactggggtgcctcctactgaaccccaaagttatcgcagacagtgcagtccaatctcagatacagaagagaacctagaagttaggtccgtttctaggggacctacttgcctttccagctgagtctggaacatctggcggtagccctcacctctaccccctaaggcagctctggaaccagcccagcctcccagcgctgtgcaagatctgtcaagttgtttctctctctggtctcagtgaacatcaacacataaaaaaaagtgaggcagatgggagatgtgcttccaaagaggttacttcactgttgattagggttacctgggaacacacgaaatcaagacagtacaatgtattggccaagagcacagaaacggccagccggtgcaaatctggctctgcaggggaatgtggtcagttattttgccttcctatgcatcagtttcttcttctataaaatgcagatattagtggtacttacctaatagcattattatgggatttctgttaatatggggtattaaatgcttggaccaatacttggtcaaagttgaactcaataaatgtcagcttgcattttcaagtgtaatgaaagaagtcttaggaagagggacaaaagatgtgagaaagggcctaagttttggggtcgagaagttatgagtgtgaatttcaatttcacacatgctacctgtgaaattctggcattaggtgtgtgttacttttgtgaacttccatatacccacctgaaagagaggaagaaaatagtatctacggcatagatttgttgcaagggattgatgatatgtcaaatgtgaaagtgtctggcatgtaataacccatcaataaacagtcgtttctttcccaagtcctttctttggtgaaaagaggaaataaagcctaggagagttgattacgcaggctgcatttactcaatctgtaaataagatatttctgagaataatatttttaaaagttagaatattttaaacttttccattttctcctgtggacatttcttataatatttatcactcagatcattaaagaaactgaagcaacttattttaaaactccattaaaattatttaatttaaaattatttttatttttatggatacatagtagttgtacatattgatggggtacatgcgatatttagatacaagcatacaatgtgtaatgatcaaatcagggtaattggagcatccatcatctcaaacatgtcttatttctttgtattagggacgttccaattccactcttctcattgtttgaaaatatgcaataaattattaactgtagactagatcttattccttgcatctaattgtatttttgtacccattaactaacccttctttatttccccttgcactacagttcccagcctctggtaaccatcattctactctctatctccatgggttcaattctttttagctctcacatttgagtgagaacacatgatatcggttcttctgtgcctggcttacttcccttaacataatgtcctctagttccatctatgttgttgcaaatgacaggatttcaatctttttttttgctgaataacattccattgagtatatgtaccacgttttctttattcattctgccatggttgaacacttaggttaatttcacatcctggcctattgtgaaaagggctgcaataaacatcggagtgcagatgtctctgctatatattgttttcctttctttaagatataaacccagcaatgggattgctggattatatggaaattttttatttttttgaggaacctccatactgttctccatagtggttgtactaatttacgttcccaccaacagcgtaagagggtttccttgtctccacatctttgtcagcgttattgcctgtcttttggatacattttaattggggtgaaatgatatctcattgtcattttgatttgcatttctctcaatgattagtgatgttgagcatttttccgtataccggttggccatttgtatgtctttttagaaacgtctattcagatcttttgctcatttttaaattggattacttgaattttttgctattgagtactttgagcttcttataaattctggttattaatcccttgtcagatgaaaaacgccatttttatgaataatggatatggctattttgtcccaagagtacaagcagtagagtttaactcaacatctaaaattacaaagtgcatatgttgcagctaaagatttaaatctaggctaaatgtggtattaatttgcattgaagacattaaacctgaccctttaaattctattcattacaataataaaaataagcatttagcttatataaccaatgaagtaagaatttccatacaaatgatatatgcatatgttctaaatacttcttatgtacggtttcattttgacccagttaaatcatttgctcatttgttcattttttttttgctgtgactgctttctgcctgtgcttattaaaatgcttgtgtctctttgatgaagaaaaaaattactgatatttgttatttttgtacccagttggtgtgaccccatatggttatgcatcccggtttgagatccactttgatgacaaatttgatgtgtcttttgggagagagggagagacaatgagtctaggctgtcgtgttgtcatcactcctgaaattaaacatttccagccagagatccagtggtacagaaacggtgagtctttacaatgaatgctcacttaggttcttattcgaaggttgtagaccagattgcagatctgtttatcggagctggtggaatctggaagttagaagggactacctttacacgattaaaaggttttcacatgtgtagcaaagtagcaacactttcatatttgtggagatgatattttccttttaacaagtaagatgtggaaagaatcataaagaatgtatattctgctgggcgtggtggctcatgcctgtaatctcagcactttgggaggctgagatgggcagataacctgaggtcaggagtttgagaccagactggccaacatgacgaaaccctgtctctactaaaaatacgaaaattagccaggcgtggtggtgtgcacctgtaatcccagctactcaggaggctgaagcaggagaatcacttgaacccaggaggcagaggttgcagtgagtggagatggcgccattgcactccgcctgggcgacggagagactgtctcaaaaaaaaaaaagtatattcattttgtaagttaatccatttggtaaaatacccatcctcatagacttatttataccataaaaatggtatgtaactttaaaaaacataaccttatgaaacaataaaatcctgatattattattaattaaccagaagagtacattcagaagaatttcagactctggcacttttgttttaacgtattaaaggctttttataattttgaaatttttgataagtgtattctgcatgcaatatatccaagttctactgatgtccctgaaggacacaaaaatagataaaatgatccttttgttttacatcatattataacaggctggtagaacagaaagaaaatccttccattgtcagttcctctgactctggctttaaatcacaattcaatctcactttgcttcaaaagggcctagagccatgatagtttggtgtgagaaagaaataaggatttaatttcccctttttaaactccatttgggttaaagtatatttaaagtaacactccagataaaacccagtcaaagcaaaacaagatgaagaagctatcaaaacaagttgatgagttgaagcactggacttgaaaaataatgctatttctaaaataacaataggccgggcacagcggctcacacctgtaatcccagcactttgggaggctgaagtgggcagatcacctgaggtcaggagtttgagaccagcctggccaacatggtgaaaccctgtctctaccaaaaaatacaaaaattagccgggcgtggtggcgcacacctgtagtcccagctacttgcgtggctgaggcaggggaatcgcttgaactcagaaggcagaagttgcagtgaaccaagattgcgccattgcactccagcctgggctatagagcgggactccatctcaaaacaaaacaaaacaaaaaacataaaataaaataacaataaatctcaggtccaaatacactaagtttctatactagagtatctcatagaatagaccaagatatagaaactgtctgaagagaataagggattgccccaaatcacacagtcaaatccttgccacgggagacctccagacctgctggtgtttactctaagcctggacatcttttcactaccatgtgcctccttttatattgtctgtattaggtctaacacagacaaaaagcctcctgagaaaacttgtactttctctgacttgtctgcctccctttatgcctaggtattgaaaaaagcattgaaatttaagaaattgaatttgcccgtacatacatatctgcgaggcccatgctagctcctagctaacagaagatgtgtcatggagagagcaatgaataaggcctagggactttcatcatcccttttaatttatcttaaagttttctctaggtttatttatagagacgattatgttttaaagctcttaaaaactttaaaattccagacatatttagtagtgtactagtaagattaccatataatttttctgtttaattgttttagaaaataaattttggaaaaatacagaaaaatgaaagaaaaagtagtaaatgataatgccttgcggtattgtcctataaggtcctttattactattatttgtatgactatttattattcaaactccattttgttcaggtaaaaaaacaaaggcacggagaggttaagtaatttccctgaaagttacataattagttagtgaaagagatcagactgagctgggcacggtggctcaggcctgtgatcccagcactttgggaggctgaggtgggcagatcacttgaggtctggagtttgagaccagcctggccaacctggtaaaaccccatatctactaaaaaaacaaaacaaaacaaaaaaagaattagccaggcgtggtggtgcatgcctgtaatcccagctactcaggaggctgaggcactataatcgcttgaacccgggaggcggaggttgcaatgagctgagatcacaccgctgcactctagcctggatgacagactgagacgccgcctcaaataaaaaaaaaaaaaaaaaaaaagacttgagatagaaagagatcagactgaaatatagctcctctccagagctgactttttgggcctgtgaatggtgccattttacaggaccaagagatctgggcttcatttaatgctctgctgtcaccccttgaagttcataatcactttatctttgatcttgtgttttatacatggagtccagtgggactatggcacatgcacatgatcggaggaaatacgggaatggcagtgcagacaaatgtaggtgcaggctcctgggcacagtgggcagtgggtagtaggcagtgtgagcaccaagctgcaggtgtggtcttcagttgtgcacatgagcacttggggcagtctgtggcaccatggcattccaaggtgatgaaagagaccaggacctaaggccagactggaattagcaatggtggtggcaccagcagcagtagcagtggtgatgggtcccatggctgcagaggagagaaggggctcggcatggaggcagcatagggacacacagtgtggggacagattgcctggccttccccagaactcagctctgtgggatctgcacaaatattaactcctggcctgagcatggggacaggaactgctggcaataggacagtaaattttgtcactaaaatattataaaataaaagtgtacatgtagacactgcaataaagcacataaggcagttattagaattcttcaaggaggtttgaatctctggttttgaggcttagaattagaagttacatttaaagattgtagcatttgatggaaaagaacattttcatatgaaactttggataagcctattattaacaaggaagacagttttaaaattaccacttataattgaagatacagtaatagaatacataaacaggcatcctgaattttatacaaatcatgaaatcatgttcggcttgtagtgtcacctccacaggttaaagccatattggacaaagcattaaaatgaaactgtataaattcacacttaaaattaaatagagatttacatgaaactgatttgtatgaagagttaaatctttttagaataattgtccctttattctagattctagattgtccctttattctaggttctagaatctggagtcatcagttctagattgctaaaatttatattttgaaatagtttctcagaaagttaacccaatgttgtcatagcctatataacttttttaacagctccagtaacagttacatcagcagaaaggtccttctaaaaaaattatgggaattaattcatgagcttgcatttataaatagttactgatgttgcttttgattatattgatttaaaatgaagttgctaaaagtataaattttgatgactaataaatgaatttgcagaaaagcagacagcaatatcttattatcaatcaaggtctcctactagtaacgtattattattgattgcatatacaattatggcaccaaaatacgattttttgcaacttgtattacccctattacattactataagtaataaaatatttttaaaggaagaagacatattttagcacctttaattgcactttttctctgctttttgaacaaggggccttgtaatgtaattttacacgaggcccctgcggattatgtgtctgccccttatccccttacttttggtccagtatttttaccaatgtaaacatatcaggatggctcaaagtcctagagacttcctctagtagttaaattactttcattatagaaaaggctaaggagaggaatggaggggagacaagaaggaagttataaaacaaaaataagttaatttgcttacttttaaaatatttctaggagtacctctttctccatcaaaatgggtgcaaacactttggagtggagagcgggcaacgctgacattttcccatctcaacaaagaagatgaaggcctctatacaatccgtgtacggatgggagaatattatgaacaatatagtgcttatgtctttgttcgaggtaagtcctagcaaaaaacaaaacacctaacaatatttagtacactgaagccaaagcagtttttgattacaaaacagttcaaacatgtttcataatgatggaagagtcatttcaaaattctggcagggtgcaatgtctcacgcctgtaatcccagcactttgggaggccaaggtgggaggatctcttgaacccagggattcaagaccagcccagtaacataggcaagaacccatttctacaaaaaaaaatttttttgattagctgggcatggcggcatgcacctgtggtcccagctacttgggaggctgaagagggaggatcactcaagcccgagaagtcaaggctgcagtgagctgtgattgcaccactgcactccagcctgggtgatagaacaagaccccgtctcaaaaaacaaaacaaaatgaaacaaaacaaaacaaaaccaaaaaaaaaagaaagaaaagaaaaaggaaattcttgcagattacattgaataagaatatgttcgtttccaataaaatagacctaggcccggtggctcatgcctgtaatcccagcactttaggaagctgagatgtgtggatcacttgagctcaggagttcaagaccagcctgggcaacatggtaaaatctcatctctacaaaaaatacaaaaaattagccgggcatggtggtgcgcgcttgtagtctcagctacttgggaggctggagtgggaggatggcttgggcctggcaggcagaagttcaagttggctgagattatgccactgcactccagcctgggtgacagagtgagaccctgtctcaaaagaaaaacaaaaaaaaaagtagacctagtgtaaaaggtgagccctgagggcaccaactcaaaagtcaccattttccagaccatgtttccatcattaatatcaggactttcttcgtcttcagggagctgctagtacagttccctatgactgttccggtggagatgctaaatcctaatgataccagccatctcagtttaaggaagctgctgcaaaagagggatctgttattttgggtgtaagtctttaatgtgtatttcagagagtaaatttattatttcatttcaggtcccttggcccataactgaactttatagcctctgttttgatgaactaggaagcaaggggtttcagcttaattcttgagacaaaccaaaattgttgactttaggagtctttctttttttcagtggtgtgtggttttttgtttttttttgtttttttgagtgggagtctcagtcacccaggctggagtgcagtgcagtggcttgatctcggctcactgcaagctccgcctcctgggttcacaccattctcttgcgtcagcctcccgagtagctgggactacaggcgcccaccaccatgcccggctaatttttttgtatttttagtagagatggggtttcaccgtgttagccaggatggtctcgatctcctgacctcgtgatccaccggtctcggtctcccaaagtgctgggattacaggcgtgagcccacgcccggccttttcagtggtgtcttaaatggattggatatgcacatgtggaatattattcctccacgggatcctagcacttgggaagaccattagcacttttaggctaccagggtagtgttctgtgtttttttatggcatgattagtcaggtgcagtcataagaagagatctagtagaggcacaagaaaacaatgtttataatactcacaggtcctagaacaggaacagctgggacacgtgggaaagtgccagtgtcagtcatgagtcagaaggggcaggaggagcaaaggagtgcctagaccaagccctttattggagtttccttgggtagggaaagcagggcaagtaaacaagttaggattggctagttcaaataatttcagtaggctgtaagttacaggtgtggtccctacttgcctggtatctggccccggggatgattaaggcagaaccatattgtttcctgggttctacaggccagataaaggaggtgtggctgaagtggctagtttgcatatcagtcatgctcccctctgggccctaagaattggctcgcctcaggaaggcaggccctccttagccagaatggtgtctaagatgttaaagcatcataatatagagaaaatttaaaatataaacaatgcaggtagactagctcatttttatctctcttacactaaatagagtcataaactcataaacattttgagtactcaactgggatccacagacttccaaaaggtctatgattagaactgtatttcaatatatttaggttttctggtaatcacatgagttttattttatgtgtgtaaatgcattactctcagaaggacctctaggctttaccggcttgtcaaaggggtcgatggctcaaaaaatgttagaattctcatcctagtacaaccccttaattttatgatgcagaaactgaggttcaaaaaagtacggtaatttaccaaaaacttcagttaattagaagcagaagtggaactagcttataggtcttccagtggctaacccaggattttaattaggatctagactaagctgctgaaatgaaataacaaaagatttgtttctctcctgtatgtgaaagttgggtatgatccagatgcctcttcctaggtcccctctatgttgttattgcactgtgccctggggtactgtcccaggttctcatcccagcctatggggaggagaaagaaagggagtggaggggcagaggccgaattgccctcatcacttctgcttagtgccctcatcacttctgcttagtgcacacttagcacatgcagacacttcacagtgaggggagctagcaggtactgtctcttgttagccagccatgtttcctgctaacgctcaggggtcctagtactaaaaggaagcaggaagaatgattgctggggacagttagcaggccacaccacatcggcattgaacagtaaaaatgaccactgaattctgtcccagaccggcaactggtatagatacctgaatatctaaacatctgaaaagcatataaggctttctccaccacaaaggcatcatgaaaaagtctatatcatcagggaagacaggagctggccttctgggaaaattgcagtgagaaccaacacactgcaattagcaagtgcgttcatttagccaaatcaccaggatcaacctggctagatgaggatgaactaagctaagtctttgcttccactttccactgttttactagagccagagaacatcgctggctattccaaaaacctttgtcatgctatggtccttccttcatgaactttttctaggaaccctgacccagtctagggttcctcaacatttctcagcgcccacacccagaatggtgcctctttgccaggtttaggccagactccacgttactaactatggatggggcgaaggtgttccaatttaaaatttatacttaagccagctttcaaatccacaaattaaggaaatggaaagattctcagtttatcagaggttgatgtgagagcattgaaaagataaatagaaaaggcaaaattggaaaggtaaatttcagcaattgcattgtgaattttacaatctttagaaaaagatttcacttataaatgtattttaaatgatatatattaggttttttaaagcatatttttgagatataatttgtataccataaagttcactcatgttaagtatacaatttggtgctttttagtatatttacagagttgggcaaccattacccacactccacttttagaaaatgttgaccaggtacaatggctcacgcctgtaatcccagcactttgggaggccaagataggaggatctcttgagcccaggagtgtgagaccagcctgggccacatagcaagaccccatctctacaaaaactgaaaacaattagctgggtgtgatgcatgcctgtagtcccagctactcaggaggctgagatgggaggattgcttgagcccaagaggtcgaggctgcaatgactggtgattgcaacactgcactccagcttgggtgacagaacgagaccctgtctcaaaaaaaagaaagaaaaaaaagagagagagaagaagaaaaggaaaggaagggaagggaagggaaaggaaggaggaggaggaggaggaagagaagaagaagaaggaggaggagaagaaggaggaggaggaagagaagaagaagaaggaggaggaggaggagaaggaggaggaagaggagaaggagaagaagaagtaggagaagaagaaaagagaataagagagggagagagagaaggaaggcaggcagggaaggaaggagggaaggagagaaggaaggaaggaaggaaggaaggaaggaaggaaggaaggaaggaaggaaggaaggaaggaaaagaaagaaaatttacatcaccccaaaaagatttctcctccctatttccctctcccataaccagtctagtctcccgcaactactaattcactttctatctctgtagatttgtctttctggacatttctggatctctatggttttttatgtcggccttctttggctttacatgttttgaggttcattcatgttgtaagacatattgttcctttttcttattaaattgcattccaatacatggatatgcatccttttgcctatacgttcacccgctgatggacagtgcgattgttttcactctttggttattataaacatgtgtgttcatatttataggcctatatcttcatttctcttgggtatctacctacaagtggaattgctaggtcatatggtaaatttgtgtttaactttgtaagaaactgccattgcttaaataatattttatttttaaaaaaactttgtattcattgagctgcacgaggtcacttcagggcattgttttggagctctgatattcttacagcttagaaaacagcttccacaccagaacgatcagtgtataaagcaccatatgtctgcagaaacacattgtaaagagctgtacacatttggccaagattttattacatagataatatgtgttcattgtgaaaaaaatagataatataaatttaacaaataaaaagtaaagccatccgtaagtctgccacccacaggtatccagtgttatcattttattacatattccttgaggctttgatgtattctttccttctctttctcttttctttttttttcacactctgtttctcttgctctctctcatgcagagaggagacagagaaataataaagtgataaaggatgtcattaaaatgtcatgaaagaagaattgaaaatggcaaataagtgtatgaaaaaattttcattagcaatcaaaacaatgaaaattgaaatgaggctgggcacagtggctcatgccggtaatcccagcactttgggaggcccaggtgggaggatcacttgagcccaggagttcaagaccagcctgggcaacacagtgagaccctgtctctacaaaaaataaaaaaattagctgggcatagtggagtatacctataatcctagctacttgggaggctgaagagggaggagagcttgagcctgggaggtcaaagccaccgggaactatgattgcctcactgcactccagcctgggccacagagtgagaccctatctcaaaaaaagaaagaaaaaaagaaaattgaaatgagattgtttttcctatcatattgaaaagatgtaaagttttttgaaatccactggggtaaaggaatggaggaacaggcactgctgcagtggctggtgagtataaatttgttcaacttttctcaggctctttgccactaaatatcaaaaacacacatttccaacaattctagttctaagaactgaggggacagaggtgaaaaaaatgtttgggggaaaattggaagaaatatagatattcaccaatatgcaagttgtagagtaaagtataatagatgctccatgaaacgatgacataccacacagcaatgaaaaccaatgtctacccacatgtattgatatggaaatatatcaagaaaaaacagcttacatgaaactatatagtacaatcactttgtttcaaaaataatcatttctgagtttataaatatagaataaaagtctagaaagatttaggccaatatggtaatagtagttatctctgggttgtaaaaaagggattttaacatattttttgattatcatatagttcatataaaatatatgtaacacttttacaataaagacaatagaattacttacattttgcaaaaagttattaatagtctgtgtcagaggtcaaaatataaagagtagtaggctaatctttgatctaataatcaaacttataaaaagtttggctatttggagggctgggagagggaagggcagaggcgtagaagaggattaatgttgtctgaagggtgctgtgggccccacactgtgtagcagctgctagaagccaaatactgtgtttccttgcttcacagctgcctcttgtcatcccaagtatgttttgtttctcacactatatcgtagcttcttgagaaaaagaaggattattattattattattattattattattattattattattatttttggagacaaggtcttgctctgtcacccaggctggagtgtagtggtgcaatcatagcttactgcagcctctacctcccaggctcaagcaatcctcttccctcagcctctcaagttactggaaacataggcccgcactaccacacctggctatttttttaaaatgcatagagacagagtctcaccatgttgcccaggctgctcttgaattcctaggctcaagtgatctacccaaagtgctaggattacaggcgtgacccactgcacccagctaggatccttattttttaacttttgcagttaacacctagaagagtactgaatgaatgaatgagagaatgaatgaatgagagaatgaatgagagaatgaatgcctgagtaacttggaagattgtcaagcccacctcagttccaagcaatgctatacaaatgttgaacaatggctccctgaatgcccgctgtctgccaggctccattacagcgtattcctgccatcgtgcatctatgccatggatgcccagctcactgagctctgctctatcaatgcaggggctcctggttgttgtggtataggccgttagcaaaaggacatggctagaggttgccagctgtccctcttgtagctgatggctttctagcagtgcctcttttgcagcccaagcatgtcagcctcagcatccccacctcctctgcagctctgctctgcctttgccatcagcagccccactctccgccatccagtgctctgaaagcctggaaggaaagaagtgtctcgccgggcgcggtggctcacgcctgtaatcccagcactttgggaggccgaggcgggcggatcacaaggtcaggagttcgagaccatcctggctaatacggtgaatccccatctctactaaaaatacaaaaaaaattagccgggcataggtggtgcacgcctgtagtcccagctactcaggaggcttgaggcaggagaatggcgtgaacccgggaggtggagcttgcagtgagctgagatcccacctctgccctccagcctgggtgacagagcaagactctgtctcaaaaaaaaaaaaaaagaaagaagtgtctcctcatcaaaatgctcatttcccactgagtggcacgcagagattctgcattaagttttaggcacaatgagttagttacattctcctatagcacttctgcaggagatatttgcctagatgctttcctgctggttcacagaacaagaaacagaatgttcaaaacccaagtggcttgagctcttcacagataatgcaaatctattaaatgcagaagtagacagatatttctgctatgttatcaaatgtccttgtaactcataagagttacagaatgtagatcatagggaaagaaagtgtttgtttggtcgacatgggtgctttcccttgagtgagtggctcctgcatgtctcagcctcttctactaactccgtttatgaaagcgttggtcaaatgccaggaggaattggcaaatgtgggcctccacccccagggaccctgcctcttgtcttaattattctcacttaaaaggttactaactgaatattttcattcccccttctctccctcctataaacagccctgattcactaattcagctgtgcctgaggggccgtgtggtcaggggatcccatttcataaaaagggattgtagtgtttcctgtattatcccggacttttactaaactcagataaactgagctcagatgtgagtattgcattggagttcttttcctaagtgttcagtttggtaacaatcatttgattaaaacgaatgttttctctttcaaaatggtagtgtcttgcctagggactggcaaagctctatgactcgtattttcttgtggatgcctccagaaggggtatttgtctcccttgggagcctttcttagtttttcttagcaacgttgcacaatcaatgtcatgagaacagactttctggcacaactgacttgtctgaatgcaatcttcagcatctctatattaattttcttttggaacattttgggccacagggaccatgaggcaaaggtcatgggttcttttcagagcactttctattttctgacacaatgttcttcctgctgaaggtgaaaaacacacattgttatgttggtcaacaaatagcaagatttggccgggtgtgatggctcacgcctgtaatcccagcactttgggaggccgaggcgggcggatcacaaggtcaggagatcaagaccatcctggctaacacggtgaaaccccatctctaccaaaaatacaaaaagaaattagctgggcgtggtggcgggtgcctgtagtcccagctactcaggaggctgaggcaggagaatggcgtgaacccgggaggtggagcttgcagtgagctgagatcccacctctgccctccagcctgggtgacagagcgagactccgtctcaaaaaaaaaatagcaagatttgatgcttgctgcgttggggccaaagattgagccactgtgatgatgtggtaagaagcgtgtgcgctgagacctgcctgccgactgacagcatgtctgagagggttaatgggatccttctctgtctccacagatgctgatgcagagattgaaggagccccagctgctcccttggatgtgaagtgcttggaggccaacaaagattatatcatcatctcctggaaacagccagctgtcgatggagggagtcctattctcggatattttattgataagttagtgcttaggctaacatcaattacagttatttggtcatagagatgcgtgcttgatttctcccatcatttctagtggaaatattttcttttctggctttcctctcctcctctttctatttctgtatctctcttcatctttctttttctctatttgtctctgtctcagtctctcgctctctctttctctctgtatgtatatatctacacaaacatatacatacatacatatatacacatacatataatggtacctacatatatatataaaatgggtatatatacccattataaatgtgtgtgtgtgtgtgtgtgtgtgtgtgtgtgtgtattgagtaggtacttagaaacgctgatttctaattgagtgcttttacagcagttagtacctgcagatggagtgggtcactccccagcagacaaatgtgacagctcatatcatagtgtcacaaaattcatctttggaacttaggtaaataggtaggtagatatatatacatatatatatatttcatttccaagatggcctctgttaggtctctattaggtctacgaattcatagcattcttgccaaattagtaacatgagctggtagtcaaattcaaaaaattcttttttggaatttaggtaaaagttccaaaaatgaattaaatatttacctaaattccaaagatgaatttttttaaatttggctaccagcttatgtcactaatttggcaagaatgctatgaatttgtagacctcatagaggccaccttggaaatgaaatcattggaattcagcataatgtccatattcctaatatgtcaataatttaagaatatttactttggtaatactaccaaagtcttatttctacctcaggatgtgttttcaagttatacaaagaagtaacaacaaaaaatcaatagaagcaaattattcactatctataagttcttgtctatattctccaaaacttagaggctctgatatttatagtaactgggctttacacattaattatgacatgagtttggacgatacagacagcaaatttagatttggcctaaataacattgttctctgacttggtttctattcagatcgttgttccaattctcttttcatttttgagtaatgaaatctcattgtagaaatcactagagatggataatctgtgtcatattagcacaatgggtttgcaccaagggtgtgttgaacttcgcagtacataaatacatgcaattgtgctcagaactatttgtaagaaatatttctaataaattatatactatttaaccatccatgtgaactaatgcttccacaacatttcatcatttagtagtgatgaattgtgaaggtttagatatattcttttttgtgctttattgtctttggcacatttccaggggatttttaaactttgaccagtgaaaggccagggacaataagtacattttgttctcctctggccttagtcatagtgaaaatacccaccttgtggctattatttattaagcatttactgtgtgcatggcactgttctaaacacttcgcatatattaaccactaacccataaccgccctttaaggtcgttgctattatttcaagtaggaaatgaggcccgagaccacatatcagtgaggaagcactaactcacctaagatcacgcgggtaataagtagcagaactagaattcagatgtgagcctggctgtaggtttgtgttctttctgctccaacgtgctgcggaaagtgtcaggagcagtgagttccacctttctttctgcccacatgaggttaggaaggatgctctagtgtcactgggtcaccatagcagtatctgcacagagaagaggctgagtcctggcagaatctctggagacaggtgtagattgaagaattgtcctggccctatcagcttctgccacagccccacctccccaaacccctagcagctccagaatttctaccaaggaggattaggggaaatgatggaaggcagggattgaagccacatttgacagcactttacataaggaaagtgaggaagttgtctattccactttacataaggaaattgtctattgtccatatcaaagagaggaaggtgattgtgaggaggggagatacaccccccacaccagccacctctgtcctgccactggcaacccccacgcccctgagaatcatttgggaattacacattttggacatagagcccatgttggggaaatgatatgagctaaaagtacagcactctgctcataaaaaaagtaagagctgcttaatcctaatctgtaaaatttaatcacatgttgaacccctaaagctttgttgatcaggccaacagcatgatatgagctgtcatatttgtctgctgggaatgacccactccatccccaggtaccaactgctgtaaaagcactcaattagaaatcagtgtttccaagtacccactcaatctgcccctgccaggactgggcatctccccacctgtcatcagtctcttctgttaaagaaacaaacatcttcacaataaccttcttaccctctacacaggatggaatgaccatgaagtgaggaaatatggtgaactcttttccaaactacagtgcaaatagttaggttttaagacgccaattttctcaataatacctctgtttttcaaagaaaatacctaaagaagacaaagaagtcactaatggtagaattgaaggcatcagccggggagatgtttggggatcttctccaatgctaagattggagatatttatctgcttatcccagcaacccccaaacccctctgctttctacacaaggcccctcagatgcctgctttttacgagttcaggaaggacctgaggcttctttcctcttggtaaagaagacacagtgcatttgagtgaaacggagtgcctgcatgcagttcaccaggtagcgagccacgcctgacttggatattttatagggagaagatctgaaacaactgggtgattctgcagctctggagatattcattaagccatacttcttttaatatttttgtcaatcacgctcattcctttaggtgtgaggtgggcacagatagctggtcgcagtgcaatgacacacctgtgaagtttgctcgttttcctgtcactggattgatcgaaggtcgttcctatatcttccgagttcgagctgtgaataaaatgggaataggtttcccatctcgagtttccgagcccgtggctgctctggatccggctgagaaagctagacttaaaagtaagcacttttcatttttcaggaccttccctaaacctttttaaaatgactgcaagaatcagcttcattgcaaggttgtttctctcccttccactagagggagacaagaacaagaaatccttttttcatcagaaaatccgagggggagaatccttcgcaaacattgccttagccattctcttaagggttttattttattttattttattttattttatttattttattttattttattattttatattttattttattttattcagaaacatttatgttgttaaactgagttccaggcattgtgtgtggaatgaagtataaaagcaaagaggctggagagcatttttattcctgttattatacattccaaaaataataaaaataattttctttctggctcaaggtctatttctttaccttggagtccacccttagagcattaatatctcagcacagtgcgtctctctatatcaaaggaaaaacagatagacaacgttatatctaatctatgtctgagttctcatattagactgtcaaaaatcattttttcaggcctggcgtggtggctcacacctgtaatcccagcacttggagaggctaaggtgggaggatggcttgagcctaggagttctgagaccaacctgggcaacatagagagaccccatcttttaaaaaaaaaaaatgaaaaaaatgaaaaaaaaaaaaaaaaaaaaagccaggcatggtagcacacagctgtaagtcccagctactcaggaggctgaggtgggaggatcgctagagcccaggaggtcaaggctgcagtgagctgtgattacaccattgcactctagcctgggcaacagagcaagaccctgtctcaataataacaataataataatcttttaatatatgtagtctccaagtcttaatgtcaaaaccatggtacatgaatcatgccctgtaatcatgccttgtatttgtttcatggaaacccatatggcatctccaacaatagggaacgtaaaatgacattatgagaagagttggatagtaacatttcaggcttatgccaggcttctcaaccttggccctactggcactttaggccagtaattctttgttgttgtgggaggtggctaggggtgttctgttcattgcaggaggctgagcaacatcccttgtctctacccactagatgccagcagtgtcatggagacactaccaaatgtcacctaaagggcaaaaccacctttgtagaggactgctggtctgtgctacattcacaatgttattctttaccttcagtacgtgtagtggcatcgtaaaagtctaaataaaataatgtcactggctgggcatggtggctcacacctgtaatcccagcactctgggaggtcgaggcgggtggatcacctgaggtcaggagttcgtgaccagccgggccaacatggcgaaaccccgtctctactaaaaattacaaaaaattagccaggcgtggtggcgggcgcctgtaatcccagctactcgggaggctgaggcaggagaatcatttgaacccgggaggcggaggttgcagtgagctgagatcgcgccactgcactccagcctaggcgacagagcgagactccatctgaaaataataataataataatgttaccatttccccggcaaccgtgtctcatcaggctccttgattgctcttcagtcactcttcaccaaccctccaacttcctgccctcctttctaaacttgcaaattccatctcatactttcgtttgctcctcttttatcaattccaatcaaaataagatttgtttgaactaaaaataagttaccttctttactgcctttctgtttttcacaaaccctgacaaaaagtcccctggttaatgcaagagtagaactactctgtctttctgatgtttatgggatcatacaagtgaatttcctctttaactttgtacccgtatcattcattttccttgctcaggatctcaactgatttcctttggagataatatttttcaaaatataatgggaaaaatttgctttgctgagctttaccgcaggatcggcaccccctctcctctttcatcttattatgacaataaataactactgggcttacaattgttctggaaatgtttctcccaaacgcatgctatccttcagaggggatgagcaagcctacctgttccaggagattcatattgaacagttacatgaacacaggttacttacctagcttgtgcaagtacagttccagaaacatctactcagccagtccaggcagattctaggctccagcagattatgagtcccttgaggaccggggctgtgcttcccacagtgccctctacatgattgataccattcatgggaaaacacataagtctattagtaacaaacccagttgtgactaatctggccactttcccaattcatcagtgcagctgataaattgcacacttgtaaacgtttgtgattcttatatttgtctttattcaggtcgcccctcagcaccctggactggacagatcattgttactgaagaggaaccttcaggtaagaagtctggttgccccagatactattgctgatgttttgctaagcagtttgccttttgttgtggagggtgcagtgtgtattgcttaagatgttttggtaagaacattctaaaatatctggagattgtaaataacttatgtcagagaatcccattttatttttaaagctttcttgaggtgtaattgtcatacggtatactgcaaatatgtaacatgtacaatttgataaattttacacatgtatatacccatgaaaccatcaccattttcttttttttttttttttttttttttttttggatggagtctcgctctgtcgcccagggtggagtgcaatggtgcgatctcggctcactacaagctccgcctcccgggttcacgccattctcctgcctcagcctcccgagcagctgggactacaggcgcccgccactacgcctggctaatttttgtatttttagtagagacgggatttcaccgtgttagccaggatggtctcgatctcctgacctcgtgatccgcccgtctcggcctcccaaagtgctgggatgacagacgtgagccaccgcgcccggccaccatcaccattttcaaaataatgaacgtatttgtcacccctaaatttcccctgcccattcgtaattcctccttttcatgtttccccatctccagccatcactgatctgctttctgccactgtagtttacattgtccacaattgtagatcagttgaatcatgttcatttttgtctgtttttctttactcagcataattattttgagacttatctacgttggtgtgtgtatcaattcgttccaaagtatttatccattcactgttgaaagcttctatgaacattcttaactgtttctgtggacatatgctttcatttatgtcttgtgtaaatacctaggagttgaatggatgtgttctgtggtaggtgtatgcttaatttttaaaggaactgccagctgttttctgaaatgattgtaccacgttcccttcccctccagccctacgtgagagttccacttgctcccgcattgtcactagcacttagtgtggccagtcttttcaattttagccattctagtgggttcatagtggtatttctttgtggctttgatttgcattttactcataatgtcgagcatcttttcatgtgtttatttgccagtttttgtgacattgggcatctttgtcaaatccaggtatttttcctgtttttttccccctggaaatgttatagcattagtttttacttttcactctgtgatgcatttaaaattaattttttctacattacaagaagtaagggcctcaattattactatcgttcatacttgcatatggctattaaattatttcagcaatatctattgaaaagattgttctttacccaacgaatttgtattggcaccattgtcaaattcaattgattacatatgtgtggatcaatttctggaatctctattggtcaatttttttccccttccatcaataccatactgtctttattactatagcttttctgagcttcattttttcatatataaattttagcatcttcaaatcagtataagtcttctaatcttgtgttgggtttttcccccccaaagttgtttcagctattctgtctttacatttctataaaaattttaaaatcagcttatcaacttctacaaaaaacatgctgggatttcagccgaacagcattgagtcctttgatttatgaacatagcctgtatctccattcatttagctttgttttcatttctctcaccttagtagtagttttagtgagcaggtcctgcacatttttatagatataatctcatacattcgtttgctcctcttttatcaattccaatcaaaataagatttgtttgaattgaaaataagttaccttctttactgcctttctgtttttgcacaaactctgacaaaaagttagagtatctgactttttatatatatatatttctatataatatatatatttatctataatatataatatttatatataaatatatatatttatctataatgtataatatttatatataagatatatatttatatataatatataatatttatatataatatttctgatgatgctgtaaatggtattgttttttattttaatttgtttttatgctagtataaagaaacacaattgatttttgtatattgattttgtgtcctgcatccttgctgaactaatttattaattctcacaaacattagggttttttatgaaatttattatggattttctattacaggattatgccatctataagtaaagataaattaacttcttccttttcaatctggataccttttatttctttttctttccttattgctccatctagaacctttagtacaatgttgaatagaagtggtagactggtcatctttgccttttcctgatgtcagggggaaagcattcagtctttcaccattaagtctaacattaagtgtaggttttgtatagctatcctttatcaagttgaggaaaatttcttctactcctggttttctgagagtttatattaggaaaaagtgttggattttgtcaaatgcttttcctgtatctattgagacgatcgtatgatttttatttttccattaacatgttgaattacattgattaattttagattattaaaccgaaataaaataaataacgcaaactaaacctcacagtcctgggttgaatgtcactatgttatgctgtgttatcctttttatacattgctggagtttatttgctaaaaatttttaaaggaatttttgtgtctatattcataaaagatattggtctgtggtttttcccagtaaagtcttggtttggttttggtattggggtactgagtggaaagtattaccattattttaattttttgaaagagcttgtgttaacttttattattttttttaattaaacattcagtataatttaccagcagagccatctaggcctggaggtttgttttttggtttgtttgttttgttttgttgtgggaagcttttatactgcaaattcaatttttaaaataaatttaggactattcaggttatttactttttcttgagtaaaatttaatagttttcatctttcaagaaactttttcattcataaagttgttcatattttcttattatccttttaatacctgcagaatctgtagtggtgtcacctctctcattcctaatattcgtgttttacttcctttgtcctgacctgactagaagtttatcaactttattgatgttcccaaagaaacagcttttggtttcattgattttctatatttttcttctgtttccagttttatttatttctgttcttatctttattatttccttttttctgcttatttgagtttaatttgctgggtttttttcttgtttcttaaggtagaagctgaggtccttaatttgaagtattcttttataacgcatgcatttagtgctaaatatttttttctaagtactcctttagctgtatttcacacattttgatctgttgtgttttcatttttattttgtgcaaaatactttccaattttttgataccttctttgatacatggattatttggagtatgttatttagttactaaatatttgcagatttcccaagtatatttctcttatttgtttttaatttaattctattatgaaaattaaatagaacatattttgtgttatttgaatccttgtagattttcttgaacttgttttatggtccagaaaaagatctatcttggtgaatatttagtgtgcgcttgaaaagcattgtatttttttttttttttgagatggagtctcactctgtttcccaggctggagtgcagcagctcaatgttggctcactgcaacctccgtctcccaggttcaagtgattctcctgcttcagcccccatgagtagctgggattataggcacataccaccatgccaggctaatttttgtatttttagtagagatggggtttcaccatgttggccaggctggtctcgaactcctgacctcaggttacctgcctgcctcagcctcccaaagtgctgggattacaggcgttagccacacacccagccaaaaagcatagtattctgctattgttgagttttataaatattaattaggtcaagttagttgatagcattgctcaagtcttttagatccataattatttactattgctaatatctacatgttctatcaattattgagagagtagtgatgaaatagccaaccaaatggtgcatttatctatttcttcttgcagttctaccagtttcttcatgtattttgggatgttattagatgtattaacatttttattattatatcctcttatgaattgaccactttattgttataacatgacttcttttacccatggtaatgtttttttgcttggaaatctacttttaatatagctattccagctttcttttgattagtgttagcatggtatattatttccatccttttacacttagcctatgtgtgcctttatattaatacaatgtgtttctcataggcagcatatatttgggtcttgctttttaaaaatctaaattggtaatctttgccttttaattggggtgttttaaccatttacatttcatctgatcgttgatatggttggatttaaatcaatcatcttgctatttggtttccatctattccatttatttgtttcattttttctctttttctactttttttggattgagtattttttattattccattttatctgtattctcttgttggctatgattttttattttgctttttagtagtttagaatttataatatacatcttttcacagtctaccttccagtaatattatattacttcacatgtagtgtaagaatttacaacagtgcctttttttgtttgttttttgagatggagtcttgctctgtcgcccagtctggagtgtagtgctgcagtctcggctcactgcaagctccgcctcccaggttcatgccattctcctgcctcaggctcctgagtagctgggactacagatgcccgccacaatgcccggctaattttttgtatttttagtagagatggggtttcactgtgttagtcaggatggtcttgatctcctgaccttgtgatccaccctcctcggcctcccaaagtgctgggattacaggtgtgagccaccgtgcctggccttttttttttttttttttttttttgagacagggtctcactctgttgcccaagctggagtgcagtggcatgatcatggctcactgcagcctcgacctcttgggctcaagcaattctctcacctcagcctcccaagtagctggggctataggtacacaccaccatacctggctaatttttgtattttttgtagagatgggttttcaccatgttgcccaggctcatctcaaactcctgagctcaagcgattcacctgccttggcctctcaaagtgtctggattacaggcatgagccatcgtgcctgtcctgcaacagtattattccatttcccactcttagccttggtgctgttattgtcatacattttatttgcatatttatggtaaactacacaatacgatattattattttgactgtggtcaattatctttcagagatacaaaatgtaagaaaaaggctttattgactcacatttttatcatttccattgcttttcatttatttgtttaaatccagatttccatctgatatgattttcttttcacctgaagcacttccttgaacatttctcgtagtgcaggtattttatcttttgttatgtaaaaaaaatcctctattttaccttcattcttgaaatatatcttcactgagtatagaattctaggttgacagttttttctctcagtactttaagagctttgtccagcatagtgcagatctacactacaagaatgattgcttttattcttatttttgttcctcaatatataatgtgtcttctctatctgcttttaatatattctctttatcactgttttttcagcatttgattatgatatgcattgtgtagctttcttcatatatcttgtgcttatagggtttgcaagtttctctaatctgtgagttcgtagttttcatcagatttggaaatttttcatcattatttctttaaatatttcttctgtaccccattatttttcttgacctctggagtctatgtatttccagtctcctccctccctgcctgataagaccaactttactgtaactgtaaactaaaactgtcctaaactttactaaaactataaactcaactccactgggaccttggctcctgcctatctgcttataggattctgtgccctgcttattttcatatctgagccagggtaaatcctgcttgtggagggttcatgtggctctaaactctagatgctctgggacttctgggatctgggtgcttctggaagtttgtccttgctttcacccgaacactcctgacctggcctcagaactatttaaagataagaagagtatcctagattcttagctctatattctaaatgagcaatggggctggctgcagtggctcacacctgtaatcccagcaatttgggaggccaaggcaggaggatcacttcagctcaggagttcaagaccagcctgggcaacatagggagtcctcaactctacaaaaaaaaatatttttttttgaattatgtaggtgtggtggtgtgcacctgtggtcccagctgtttggaaggctgaggtgggaggatcacttgggcccagaaggtcagggctgcagtgagccataattgcaccactgcatgccagcgtgggtgatagagtgaaacccttccccccctccaaaaaaaaccaaaacaacagcaactgctcaatggcatttgaagaatgaatgaatgaatgatgttttgggggaattttagagagaaggtacttctttaaactgtggagacataattaactcttcctcaggaggagagcagcgtctttggctctctgagtatcctgggctacccagaatgtgtgcttctcatttttccttgttgtttttcagagggtattgtgcctggccccccgacagacctctctgtcactgaggccacccggagctatgtggtgctcagctggaagccccctggccagcgtggtcatgagggcattatgtactttgtggaaaaggtaagactctagaatcaacatgacctcatactacctcctaaggatttctttagaaaagtggaggctaaattcccagggacaatggagtgagggaggaggagggagcatgtcctgatctcactagattgttatcaactgtgaactgtctccatagaacaaagtatatcacacagaactgtgcctgaaaatcaaggggtttatggatccccaagactcacccatagactcctaagagatccagacccaacatcatagcacctacaagaagagaaatgttcctgaaatggtagattgcctgtatgacaatgttttctagagaccttcctgtctcccttgctttggtaatggcttttcatctctctaccactcctccttctgtagtaggacatgaacatcgtgaggctagaagggagggggtaacggagaaggggcaatactctcaaatggccgggagtgtggaagacagcaacctcatgccactgcacttggctagctccactctgagtacaggtagcggaatgaggtcagggatcacaaaacaataaatattggcaagttctttcccagatatcttacaattatgtcaggaattagaacattagagaggacagcatgcaatgaaggcccagaatgggtggaatgaaggagaacggtatgtgaatcaaacacatatccgtatttgagggtagttctgataaggatttatgcccaacaaatggagaagagccaagacctgtacagaacattatttcggcagaactgactcagccacaagtgtagaaataggagagccggccacgcaaggcacaggtcttagtgggggtaagaagtccttggctaacaggatcattgctactggaaaacgacatttaaagagaatttgcttaaaatgaggttcaaaatccatttgttaaaaaggttctgattaggatataattgagaaaatgaaagaaaataagtttattttatcccatatgtaagaacatttattggtagtgatgcaccattttttagaacaataaatgaaacaagtgtttgtacttttaaattttatttttataaaattgtgtgatagcatgaaaaggtatcatttactttacattttagtttcatagcaaaatcgtagaatttttttttataaaaatatggtgttcagttaattttcctaaaggtctttctcttttatccttaatactgttttgatcattcaattttgtaacacctattaggtcaccttccctgataattattgcaagagaatacatttcataggtatgtaggtgtatgcaaacttctgaaaattaggtaacaacataaagacaatatgcaaatatctttgagctgcattctttacttcctttttattcctagcaaatcagtaacaatgaatgccttatctcctctacatgcaatatggatatcttccaagagagtcttgttttacaaagacaatatttaatttttatatgctttccagatatcagcttcaaatataatataacttgagtagcattctaagcctttttttttttttgagacagcctcactctgttgcccaggctggagtgcaatggcacaatctcagctcactgcaacctccgcctccctggtttaagcaattctcctgcctcagcctccctagtagctgggattacaggcgtgagccaccacgcctggctaaattttgtatttttagtagagacagggtttcaccatgttagccagggtgatctcgaactcctgacctcaagtaatcctcctgcctcagcctcccaaagtgctgggattacaggcatgacccaccacgcccggctgcattctaagctttttaaaagaaaatagatggcaaaaatagagtggtggatcaatgttcatttcctagtgtgtttaatacacacccccactgaatctctttgaaacactccacaggaagaaggttctgaataacctctgtgacagtagttaccatctttcctataataagggcacataacaactatttggaggcgttttctgcagatgagtcaactttggcttctgttgaacttttcctctggtcatataaactctaatttctctgtggaagtctataacttccctcgacctaaatacctgtgagtttgtaattaaaaatttaaatattcttcccccagcacacctattggcatggaacagaaggggacgtttatgaacacagtactatgtagggaggcctgcacagggcatagaacacccaggatgttgggtattgaggacacagagcacgtccagggacctggggtacatttgcagaaccatccaaatgtcaaactgttctgagctgaggctaaaattatttctgatgtagctgttctgatatgctaacctttctaaagggaaaaggtctgtgtgctcctgtccctgctgcgtctgttccaggatgccctgcacccagcatgctgcctcttgggccaccgctgtgcttgttcttcttcacggcatgtccttgatccctggaatgggtgaaattgaagggtttatagcaagggactcagataaatcagtccttggcacttccagcctccccatcctactgtgttctttttacacccaaactttttcctcaggtgtcttacgtcttgagctctttttctcactcccctatcaaaaatctggtcgtgtcagagacaaggactgtatcactcgttaacagcaggaacgaacatagccaagatttgcactgttctaagcaccttacatgagttaacccacttaattcttagagtagtcctatgaggtaaatatctttgttttcatcatgcctgtatatttttaagtgttttgtagagatggggtctccctatgttgcccaggctgatctcgaactcctgggctcaagctatcctcccctgttagcctcctaaagtgctgggattatagttgtgagccactgtgcctggcagatcatgcctattttgtagatgaggaaactgaggcatagaaaggtatataatttgcccgaggtcacagagctggtaaaacacagaactgagatttgaaccccagcagtctggttcaggtgcgtaaatccaactattacactgggccacctttcaatcttcccaggcttgtcttctcctctggaaaacgttgacaatcatacaatactacctccacaatacctactccatggcatagttgagaggagtaaagagtaataatggcttataaagttttcggcacagtgaaaggcagctatttttttatgagagtataaacaactgataacagcttaagaatttgccagggtggaatatgttaaaagaaatcaaagccataaatgaaaagattaaaggtctgagagagtttcgtccctcaggagacagcagacacacaaaagataatgttatcataaaaaacactgcaaggaactttagaggttaccttgtcaaatttgctcgtttcatagaagacgaaaccaaggccaagagcatgcgtgtggctttccaaggtcacgtggcttgttattaacacaaagggaccagatcccatccctttgtctcctctatgccatgccatgttgcctgtctgtcaagtcaacgaagatcatcctgtgtggtggactgataaacttaaagtcccaaaaatgtaccatcctgacagctggtcaacctgtcacgagatctggacttcagaaaagtcttttgaaaacgttacaaaattctgtagtgaaatcaggcaagagtttctaaatttcttctcttaccaaccatgggcaaagttggaaattaaaataggagggaataaggattaccaaagacttctgacagttttgttactgtatcttctaccagagctcaaatatacaccacgtccttcattcgaggatttccaagtcactctaaatcattttaattttaagaatagagtctcattaaaaattaattttcccattaattattctaagacttgggcaaaaaaagagaacatctttttttaatctggtttttattgatacacaatcattgcacatatttacagggtacactgaatattttgatacatctttgcaatgtgtaatgatcaaatcagagtaattggggtacccatcacctcaaacatttgtcatttttgtggagaaaattccaaatcttatcttttaggtattttgaaatatataataaattactgataactatagtcaccctactgtgctattgaacactagaacttatttcttctaattgtatttttgtgcccactaacaaacctctcttcaccaccacccccaacccttcccagcctctggtaaccaccattccactctctacctccatgagatcaaattttttagctcccatatatgaatgagaacatgagatatttgtctttatgtgcctgacttatttcacttagcgacctccaattatattcatattgctgcaaatgacagtacttcattcttttttgtggctgaataacattacattgtgcatatttaccacattttctttatccattcatccactgatgggcacttgggttgattccatattttggcttttgtgagtgcagcaataaacatgggagtacagatatctccttgacatactgattttctttcttttggatagatacccagcagtgggattgctggatcatatagtagaaaaacatcttcatctttcagtcatttagaaaaaaaacactgggccgggcatggtggctcacgcctgtaatcccagcactttgggaggctgaggtgggcggatcacgaggtcaggagatcgagaccatcctggctaacacggtgaaacccccctctactaaaaatacaaaaaattagccaggtgtggtggggggcgcctgtagtcccagctactcgggaggctgaggcaggagaatggcgtgaacccaggaggcggagcttgcagtgagccgagattgtgccactgcactccagcctgggcgacccagcgagactccgtctcaaaaaaaaaaaaagaaaaaagaaagaaaaaaaatactgtagttgattatgtactatttgccagatggaattctatgctctgtcataaagcagtgaacaaagctccttgagcttatgtgatttgctcttcagtggaggagacaacaaataacttaatttcaaatagtgatacatgattgaagaagaataaagcaggctaagaaacagagagtgataagaaaaggaccaagaattcttttaaataggtaatgggcaggccaggtgcagtggctcatgcctgtgggaggctgaagtgggtgaatcgcttgagcccaggagttcgagaccagcctaggcaacatggggaaaccttgtctctaccaaaaaaatacaaaaattagccaggtgtggtggcatgtgcctgtagtcccaactacttgggaggctgaggtgggaggatcacttgaacccaaagaagtcaaggctgcagtgagccgtgattgtgccactgtactccagcccaggtgacagggtaagaccctgtctcaaaaataaaataaaataaaatttaatttaatttaattaaaattagaaaattacctgaccccaaacgatcctcaaaataagacttttgtaagcagattattgtatttagttaacaaaggaagagaaatattaaagtagcatatttttcaaacaatacaacgctgtattagtccattttcatgttgttgatcgacataccagagactgggtaatttataaagaaaaagaggtttaatggactcacagttccatgtggctggggaggcctcacaatcatggtggaaggcgaaaggcacgtcttacacggtggcaggcaagacagaaggagagccaagtgaaagaggtttctccttataaaaccatcagctctcatgagacttactcactaccacgagaacagtatgggggaaaccgcccccatgattcaattatctcccaccaggtccctcccacacacatgggaattatgggagctacaattgtagatgagatttgggcagggacacagccaaaccgtatcaaaagccaagtttgatttagagaatcctacgaacttcagatgcctcatcccctatttcctcctcatctctcctccagtccagcttgcattacagggagtggtttgttgcagatgaatgaaacttggagttgcctggcctggattctcgcttgtgtttgctgtgctttcaatgggtttccctgttcttgctgcagtgtgaggcaggaacagaaaactggcagcgagtgaacacggagctccctgtgaagtctccccgctttgctctgtttgacttggccgaggggaaatcctactgtttccgtgtccgctgttctaattctgcaggagttggtgagccctcagaggcaacggaggtgactgtggtaggggacaaacttggtaagcaactgtaaacttcttttacttcaagagaaaatttcaaagcaaggatctagtatatgtatatttggccaggagtaaaaatggtgacatccttctttcatattataaatttactcgatggctgtacttaacctatacattaaacaaaaattcattatttttgtttatgaaaagtaaacttctttgggagtttcaacaatattgataatgtgttttttctgaagttcatggacatttagtttatccatgctccctaactgttttaaaattttttgctttaaaaaatacaatgtaggccaggcgcggtggctcatgtctgtaatctgagcactttgggaggccgaggcaggcagatcacctgagtccaagagtttgagaccagcctggccaacatggtgaaaccccatctctactgaaaacacaaaaattagccaggcgttgtggcacatgcctggtaattccagctactcaggaggctgaggtgggaaaattgcctgaacccaggaggtgggggctgcagtgagccgagatcccgccactgctctccagcctgggtgacagagcgagactcagtctcaaaaaaaaaaatcgtaaaataaagcagctgttcttttgacatgacgaagtgtgtaaaatacctaggtgtgtgtttgtgcatagatgataaggatgaatttttaaaaccacttgagtttgatcaccattttcctctttctcagatatccccaaggctcctggcaaaatcatcccaagcagaaacacagacacctcagtggtagtttcgtgggaggagtccaaagatgccaaagagctggtcgggtactacatagaggcgagcgttgctggctctggcaagtgggagccctgtaacaacaaccccgtgaagggctcacggtaactcagtcgggtgtgcagggcgggcaatggcctctggagctgccatagacacatacggcacacagacatccaatggaggagatttttttaaaaaattttactttttggctggatgtggtggcttacacctgtaatcctagcactttcggaggctgaggtgggaagattgcttgaagccaggatttcaagaccaacctggccaacacagtgagaccctatctttacaaactgaaaaaaaaaacaagaaaacattatactttaaataagccaaggcagtggcaggcctgtagtcctagctactcaggaggctgaggagggaggatcccttgagcttgagttcaacttgagttcaactacagcttgagtttgaagttgtaggatacaatgaccaggcctgtaaatagccactgccagcctggacagcatagggagaccccatctctaaaaaacaaaacagaacaaggctgggtgtggtggctcatgcctgtaatctcaacactttgggaggccaaggtgggcggattgcttgagcccaggagtttgagacctgcttgagcccaggagtttgagaccagcctgggcaacctggcgaaaacctgcctctacaaaaaatacaaaaatcagcccagcatggtggtgtgctgtagtcccagctactcaagaggttgaagtgggagaattccttgagcctgggagatcaaggctgcagtgagctatgatcacaacactgtactctggcctgggcaacagagcaagaccctgtctcaaaaaacaaacaagcaaaacaaaacaattacactttagatatttaaatgaatttaaaattgaacacattagatgcaatacatctttttttaaaaggttcacttatgatgttaaacacttagcaacacataatgccaactattgtaagagttcatttcatagtgcttttgctgcttcttccttttttacccctctgattttatatctaatatgcaacgtgatattagattctgaggatataatacactctacttaacataaattacccaggaattttaaatgaagagaaaaaagtatcgaaattttacaaattctggacatcaacatgattaaacccagtgctaagcagacatagttacaccaaaacaaagacattcagaataatttgctgcctctttgtatttgtttctaatggggagagggttggtttcttccttgctttcaactattttatcaatcagctttgcacattgatggtgaattctgatctgcacccagaccagagaccagtatgagagggggatgctgccctcccagaaattgtcaaatagactcgttcggcagcttctggcttggatcacttctcagtccgaggaccccaacagaatgagttggttttgcggaacgtgagagagtagagataaatgattaattagggaaggcaatatgttttgcaagagattcatttagcctgttggtgtatttcatttttccttggagttacccagcattttcctgggactattcagaaatgctggtggtgcgtaggcaggagctgctagagggcaggcaccattttttgttcatcttttgtccacagtacctaactcagtgtctggaacaccgagaccccaataaatctttgctgaagcaaagctgactctaaggactgaagggctggcctagattatggctcctttgttaaatacttgaacatgcgaatagtcatagattcgttagcagacctgttatttcctctggctgcagtccttaggatggattcaaatgttacagtgattcatgaaacagctatttatagccataatagctatgaaaagagttaggttgtttttatggatgaaacttcccatggattcacacctcattattgaatcttcatatctaaatggtaattctagaatccattgttcaccttatcttcagattctatagtaatttcccaagtaagtaccttccttggcatgcagcgagacagtgactaggcctctatgacaaggagccaccaatgccttacagccatagttatatacctaaaatagtcattgatcatattattaattgggtattaggcttaatacctgggtgatgaaataatccgtcaacaaacccctgtgacacgagtttaccaatataacaaaccttcccatgtatccctgagcctaaaataaaagttaaaaaatatatatgagttggctgggcttggtggctcttgcctgtaatcccagaactttgggaggccgaggtgggtggatcacgaggtcggagttcaagaccagcctggccaagatggtgaaactccatctctagtaaaaatacaaaaaaattagccaggcgtggtggtgggtgcctgtagtcccagctactcaggaggctgaggcagagaattgcttgaacctgggagttggaggttgcagtgagctgagattgcactactgcactccagcctgggcaacagagcgagactccgtctcaaaatatatatatatatattttagagtataactcatatatatatatatatacacacacatatataataataattttagagtataactcatatatattattatatatgtatatattattattatatatacatatatataataatattaatactaataattttaatactaattattatttattaagtacctcatatatgccaggccctatataggtactttatatactttataactaacctctacatgaaaattatcatgtaagcatcattatccctattttactggtgagcatttggggaagaccagggctcctcattttttgacagagtgggtttagaaaagtgccttagttaccttcttgtctaaagtatatatattacctgaatctttctacatctttttcttcctttaaaaaatgaattattagctgggcatgctgcttacaactgtaatcccagcactttaggaggctgaggtgggagagaggatggctcgaggccaggagttcaagactagcctgggaaacacagcaagaccccatttctgttcaaaataaatcacaataaaaaaaaaagaattgttttcataaagccagatccactccattaagctaacaatcatcttccttaatcttcctcctaggaaaattttttaaaacttgttttccttttagattcacttgtcatggattagtgactggtcagagttatattttccgggtcagagcagtcaatgcagctggacttagtgaatattcccaggattcagaagctattgaagtcaaagctgctattggtaagttccttatgcataactgtatgggggaaaaatggatttttctatgttagaaaggaagataccatcctctccagaaattatttagcttccaatattgctggatgattgcatccttagatgatcattttctctgactctaggtgatgtctaaccttccatagctgccattttacagaccttcatcacttatccagattctgtgcatccatagccttttcatcttcacgaacccaagtttcctcagatatttcacattgtgtgaaactccattctaacttcatgctcatcctgggactgtgaagggccattccgattccatgaagtggtatatcacccataacacagatcatcttgtccctaaaagccatttggtctatgccagagcctggcttgtttttgctaacagaacattaacatgcttcttataaacccctctaaaattcatgcaaggcacatgtaattgcttaatcatatgtttcatctttgcttgcaaagtaaccaacagaataaaaccagtaataaagtaattatatgtgtgtatgtgatgtacctcccaatcttggataaagtagaaaagggacccaggtggttagaaacaatacaaataatatttgtgggctgagcacgggggcttacacctgtaatcccagcactttgggagggagaggcaggcagattgcttgagtccaggagtttgagaccaacttgggcaacatagtgaaatcccatttctaaaaataacaataaaaaaaattagccaggcatggtggtgcatgtctgtagtcccagctattcagaaggctgaggcacgtggatcacttgagtccaagagttcaaggctgcagtgaactatgatctcaccactgcactccaccctggacaacaaagcaagatcctgtgtctgaaataaataaataaataaaataaaatttattatatagtaacgcatgttttttaaaaagctgatttaatattgattgtcttcagttagcatctcatatagctttttcatattccttataacatagggatcgggcacagtggctcacgcctgtaatcccagcactttgggaggctaaggcgggtggatcacttgaggtcaggagtttgagatcaacctggcctacatggctaaaccctgtctctactgaaaatacaaaaattagccgggtatggtggtgcatgcctataatcccagctacttaggaggctgaggcacgagaattgtttgaacccagaaggtggaggttgcagtgagccgagattgcgccagtgcactccagcctgggggacagagtgagactccaaaaaaaaaaaaaagaagaaagaaaacgaaggaaggaagattccttataatgtgaaccattctaaacatgtctctttgaggttgagaggtacagaccattactattgtagtactgcacataattcgaggtgttataaaattaggatctttaatatgatgtctcttgtgcactttatagtccttttttcattctgttgaataatagggcttacatctctcaatatttgtgtctaagatttgcttttccttatatatactaaaagccctttgggttctgcaaatcgaaatggttcctattctatctttggcttctttgttctcatttcttctttttccagaatacggggaaggtgaaatgttccttggcgtatattgtgtgaaatgtagtctttccatatttcttgcaaatgtgagcgattttctttaagccaagactgtttttgttctgcttgtggtcctaatgtttttctctttgttctatcctataagagcagctgatactctgtccgggctcaatgcgtttctgttgttgtctggcaactgtagggggaggagtgtctccagatgtgtgtcccgcactgagcgatgagcctggtggactaaccgcctccagggggcgcgtgcatgaagcctccccgccaaccttccagaaagatgctttgcttggcagcaaacctaacaaaccttcactacccagtagctctcaaaacctgggccaaacagaagtgagtaaagtaagtgaaacagttcaggaagagcttaccccgccaccacagaaagcggctcctcaggggaaaagtaagtctgaccccctgaaaaagaagacagacagaggtgagagttgagaaagggaagctgttccatccgtctccatcactgtcctcacctctcatcgtctacatcacatccttcatccatgtttgctttcatcaatgtccattcttattgtatgtgttttcagctagccatctgaaatgtgtactttcatctgatgacttggaaaagtaattgtctatgggtttggcttgtacacatcattttgggtgcttaatgatgctagaatgtttcaagtaatttggttatagagcctttcttggtttgtcaggcagatacacctctggcctgattttgctaagagaattcgatgtgagagcaggacttggtactgctagcctgtgtgaggtcctttgaaatagtcatgtttggaacatgtagaggagaaagatctcacaaagaaggtgacatcgtaccagggtcatagttgttaccttcttgctcatcctcagattattaagcgattattcacatttaatttaaatagtttgcaagaaaaatcaacactggaaaattaaatactttaagtgaaaaaagtatataaaaagattaaaaatttctaaaataataataatctaaatagctacttacctactactttttgaaatgaaaaaagaaaagaaaaaaacagctataaatatatctttgagttaccatgaaaagtttaaaagttaaaattataatcacatatagctatattgtatgatatatgatcctcattcccagaagtgatttatttaagatgatttatcagtaggctaagaatgatctgattaggatatttggtacctgtggctaatatatcctaggagacattgtttttcctatcaaacaacaatgaactgaagcacatgtgctgataaatttttaaatgcctctcatccagttcttttttctaaccccaccccaacttctataacctcctctgttttatgacacctttctttgtccctcaactcgagaggagatattcatttgagagcacatattcaacaatgctctgaaatagagggagagagagaaagcttttttaaaatgtgaggaataaaggaggttggtaagtggagaagagataaatgtattttattttaaaagccttcattcttctgatactctttttgggtaagaatgagatagtttctttatctcctataatccaaataaacattcagaaaattctcttcgatgttattgcatatctagatgtatttctttccaccacttcaccccctctcttcattgaaaactgtaatttcagtagttgagtgaaaagctgatcagcaaagccacataaatgaaggaggacttttgaaatatcctccagatatttttctagctaagcactgataaacatggtgacagctgtatagtattgtaccacatgaaaaatattccaacatcagattaaaaataatgtgataaaagtattatacactaagagaaagtcacatagcagattgtgtctgttttttaaaaatgttttctaaagctgtcatttagctgagctctagagtaaatttttttcttgtgtgcagacagagttgtgtagttgtaaggtctcacaagggtaagtgtgcctgaatggtgaaaggctaaccatttgagaaatatatggaaattctgggccaggtgtggtgattcacacctgtaatcccagcactttgggaggctgaggtgggtggatcacctaaggtcaggagttcgagaccagcctagccaacatggtgaaaccctgtctctcctaataatacaaaaattagccgggcatggtggtgcacacctataatcccaactacttgggaggctgaggcaggagaattgcttgaacccagaagacggaagttgcattgagccaagatggtgccattgcactcaagcctgggtgacaagagcaaaaccccagctcaaaaaaaaaaaaaaaaaaaatatatatatatatatatatatatggaaattctgaataagcaaattgcagcagaaattgatatacacattccattttcatcagggaacaaatgaaaactaaaccacataaagaaacaaaaattataccttgggaaaaatatttcttcttatggggaaaagaatcattttctttcagggtattgtaccattttgctaggacaggttcattttatctttggaataataattgtagtgtactttttactgtgtccattgcattcaccaagttcaatgccaagttcatcagcctcgaattttagttttatactgcaagatctagtgccctcatatgtggcacccatggaaatgtttatatatagaatcataaatgcatttctgcctactcacaagctattcatattgctacagcaccaccatctccaccctgtgatatcacctgtcttgaaagttttcgtgactcaatggttcttggatggaagcaaccagataagattggaggggcagaaattactggctattatgtgaactatcgcgaggtcattgatggggtaccaggaaaatggagagaagccaatgtcaaggctgtcagtgaggaggcatacaaggtaagcacgtgactttctgtagtgtggcgtgtcctatgtatgacgctatgcttgcacgcccaggcaggcacacacccagcaccttgtaagagagtcacgtcatttctccagagtccattgtctgcagtggcatgagtcttgtgaaaaatatactgtggtgaatacaagtagtttggctaaccaggcaggatttatattttctgatccatacacataagcataataaattcctagaatatttactatgaaatgtgcgcttactgtacaaactaatttttttttcaaaacttacaaaatatctacaattaatatgccactagcctcaagagtcccaggatccttctgcagccctcaagttgagggggaaaaaaaaaaaagattcccaggatttaatgacactctggatttttaactttctttttttttttttttttttgagatgaagtcttgctctgtcccccaggctggaatgcaggagtgtgatctcaactcactgcaaactccacctcccaggttaaagtgattctcctgcctcagcctcctgagtagctgggattgcaagtgaaagccaccatgctcagctaaattttctatttttagtagagggtttcaccatgttggccaggctggtctcaaactcctggcctcaagtgatccgctcacctcagcctcccaaagtgctgggattataggcatgagccaccgcggccggctgggtttttaactttcagtgtccaaattacagcggatgaagggacatgggcttgatggctagactcagctcaccagctgtgaagtggtgcttgttatagtcgcttgatggccacaaagggtggcctcacatgtgttctcctctacatgggggcctccactgctcaggtcacataagagaaccagaacagtctcactgttgccttagctgatgactttcttctctagagcttcatcagctacatccaagctaccacctcttaacactcacagaatcctctgccatgagggttcagagcagggtgaggccagggatgacagctgccccaactcaacaccatgctcttttaatttaacatttgaaatttatgaaatatcacacacatgctgagaatgcgtaaaacaaagttgctttttttttttttttgagatggagtttcgctcctggcctcaagtgatctgcccacctcagcctcccaaagtgctgggattacaagcgtgagccactgcgcctatacaaaattgtatttttaagattcttccctgttagtgcatgtggctataactcattctttttcattgctatatggtatggtattccattatgtggtcatatcacaatatattctttcattcaattcttattgctatttgggtatttttgcatttttagctacatcaagcaaagtagctatgaacaattttgtatacatctatctgctgctacatatgtgcaccagtttctctgggtgatcacctaaatgtagaatggctgggtcagggggtctgtttatcttccactttactagataattccatactgtcttctgaagagtgtgtgagaattcccatcactctgcatccttgccaacacttggtctattcacacattttcagctttgacaatctgagtgtcaaatgagtttgaacatcctttcctatgtacacagtccattttgatatcctcttttatgcctgttcaaggtttttgcccatttttctaatgcattcttgttgacttgcaaagttctttacatgttatgagtagaaatcctttgcaggtctgtaagtcgcatacatcttctctgactttaattttaatgtcaaattcattgtagtcatatttactaacatatgctttgtccttagtgatttttgtgcctttgtggtgaaatgccttctctattccaagatcatggaggtactgtagttgattacattctaaaagctatactattttgccacttacatttctgtcattaattcacctttatatttttatatgctgtgagttaagcatcaaaattaacccccccccacagagacatagttgtcccagcattatctattgaaaagtttggggccgggcgcggtggctcacgcctgtaatcccagcactttgggaggccgaggcaggtggatcatgaggtcaggagatcgagactatcctggctaacacggtgaaaccctgtctctactaaaaatacaaaaaaattagccgggcgtggtggcgggcactcagctcctcgggagtcccaggagtggtggagtcccagctcctcaggaggctgaggcaggagaatggcgtgaacctgggaggcggagcttgcagtgagccaagatcgcacgccactgcactccagcctgggcgacagagtgagactccatctcaaaaaaaaaaaaaaagaaaaaagaaaagtttgtcgtctgcctgctattctgcaggggtatctgtatcatatatcgtttccttatatgcgtgagtctgtgttcgtgcttcccatgctgttccactggtctgtttgtgtaacagtgggtgactaccacactgatttaaatattatagctttataggccgggcatggtggctcgcacctgtagtctcagcactttgggaggccgaggtggggggatcacttgaggccaggagtttgagaccagcctggccaacatggtgaaaccctgtctctactaaaaatacaaaaattagccaggagtggtggctctcatgtgtaatcccagctacttttataccttttactcaggaggctgaggcatgagaatcacttgaacccgggaggtggaggttgcagtgagctgagatcacaccactgcactccaggcttggtgacagagcgagatcctgtctcaaaaaaaataaataaataaaaataaattatagctttatagtaaagttgatgactgatagatcagcttctcctggtttattctttttccagagctactcttagccctttgcacttgatataaatttaagtattagggtcccaagttctaccaaaaaaaaaaaaatagtaataataataagtaagacaaaacaaaagaaaacaacaataaaaaaacttacattcaacccaactaaacccattagaattctgattgaggatgcattgaatctgtaaaaaaattaaggaataattgacatttaaaaaatattgaaccttctaatccatgaacatgttatttttcttcattcgttttggtctttttaaagcctcttattaaagttttacgattctctacagaggtttgtatatcatttgttatttattaatagagacgatatattttcagtatatttttatatcagtttttattgctagtaaagagaaatataacttttatatattgatttcacatataattattatatgtagtcttttgttaaattttttaaataatttgaatgttaccttgaagttcttttggagtctatgtatattcatatcatctgcaaatagtggcaatttacttcatttccaaattttataacttttacttcattttcttaccttactttctgcatagtgactttagcactatattgaataaaagtggtggtgctgggggcatggtggctcacacctgtaatcccagcactttgggagcctgaggcggtggattgcttcaacccgggagttcaagaccagcctgggcaacacagcacgacaccgtctcagattttcttctttttttttaaagtggtgatgttggtcattctaggcttgatagttatcttaaagggaaattttacaacatttcaccattaaatactgtattgtgtgttacaggtgttttgtagacatctattatcggttaaaggaagtttccttctattccccgtttgccaacagttaattaaaattatcaaaaacatttttggggtctattgagaagattatatgatttttttcccttttattataatttggtatattctagtaattgtctaatgttaaaactaccttgcattcctggaataaattcaacttggatactatatatactctgtttatatcacctggattttgtttgccaattatcgtttaggatttttgcttctatgttcatgagtgagattattctgagactagaattaatttaatactaatatctgacaaggatagtacaggaaggaaaaaaatgcaggatagtctccctttattaagatataattcacacatcataaagttcactcatttaaaatgttgccttatgaattttgaagtgatatttttaaatggatacaaagtgactctttaccattatgaatacattttaccttaaagtctatattgcctgttattaccatagatacactagggttttggggtggggtgacttttgcatggtatgtagcttttcatcctttaactttctatctttctgaaactttctgctttacatgtgtctcttaaaaatagcacggagttaaattttgtgtttttcctccctgacagtctttgtcatttgtttgctattactgattacttaaaaaaaaaaaaaaactaatatcttattttgtactttctatttgtcctttctgttctgtgtttctttctctttttttgagacaaagtctcactctgtccctgaggctggagtacagtggcatgatcttgactcactgcaacctccgcctcctgggttcaaacaattcccgtgcctcagcctcccaagtagctggaattacaggcatgtgccaccacgcctggctaatttttgtatttttagaagaaacagggtttcaccatgttggccaggctggtctcaaactcctgacctcaagtgatccgcccgcctcggcctcccaaagtgctgggattacaggcgtcagacaccacacctggcctgttctgtgtttcattttctgtccttttttgactatttttgaatcgtttttaaaagttgttcaatttttccttctattctaccttaaaagttatagattccgagtttctttcgttttggtgactgtgcaacttaaagtctgaagttatttcatttgttttactcttgtctcagaaacagaagggccttaaaaactttacccctttacctttttcccaacttgtatgctattgtgtatgtatgtgtctgtgttttaattctttttaaaatccaaacagcaatgtgattattgttttatagattcaacttaccaatatatttaccattttatttgcttttaattaagtgctttgaagatgtaattgcaccatcttctggcccattgttgccgctgacattcaactcttggtctgcttgcttgtttgagggtaatttgccttttttcttggacagcttttgatatgttcactttatctttggtgtgctatacttaaaatactataggtctagatgtgggtttttaaaaaagatgtatctacccgggattttagggggcagaggatttttcatctgtgggttggatttttcagaagatctttctagaaaattctgtatctcctaaaatattgtttctccctcattttctctctctctgcacttctcccaaaactaattaaacatatgtttgatgttctcattctatcttccatgtctattaatcaacttttctctctttcccatttttgagtctttccacatcatgttctgtgtaatttcttctgactttctgtcagtttacaaactctctcttcttttgcatctgatactctgttgaaaatgtctgttatttttttcttactgtattttccatctcttgtcggtcacattttacatattttatagtttgctgcttcctacaaatgtttttcacactaatatattccatcacttctattttgcaaatgttttaacatttattattttgtcatgtatatttaccctcacaacaacccagttcctactgagtgatacggaaaatattaggtcactcagtaaagagcagaaacattatgagaacttgagcattttgattcctagcttagaactcgtttaaatttcacctgtacatgccctagctttctattgctacatagcaaattaccacagactcggtggctgaaaacaatgcacatttgttgtatcacggtgtccttgagtcaggggtctgcgcacggcgttgcagggtcgtctgttcaggatctcacagggctgcaatccggttatcagctgggccacattcatgttgagttcctcttccaagcccgctcaggttgttggcagaattcagttccttgcagctgtagggctgaggcttccactcctagatgttgcctttctccaaatgtgagtgggtaggcagctctcagtgtgacatttacctcctcaaggccattggcaccatgtttttctttaggaggggcccgaaccccattgtaagagttcttacctgataacatcaggcccatccaggataatttcccttttaattaacctcaaatcagctgactagggaccctaatctataatatcttttctcctttgccatatggggtgacacaatcacaggacttgatctcccaatccctttgccacattctattgtaggctacaaggaggtcacggtttcatccacacccaggagattacaaaaggggtgtgactcattgagggtcaccctagggtgtgtctgacatggaaggtaaataaataaaatgctcaacaagtagaaaaaaaaaaacaaacctggaacattcagtatctgtgatgttgtcaatgttgcagattagcaacttgaaggaaaacatggtgtatcagttccaagtggcagccatgaacatggctgggctgggcgcgccctccgcagtaagcgaatgcttcaaatgtgaagagtggaccatcgccgtcccaggtaaaccacagacacctgcctccacaccgcacctcggaatttcctccaagagaacctacaacctggaatgaaattcaaagtactatatggtcaatatttaagggaaaagaattctcttggccccttgtgtttacctaaaatattttaatgataatattaaataataggtagcaatgtaaaactgagtataaattccttatgcttgtgttcccagtaaatcctagagccctcatcgctcagcctgtgcgaggagtaggattagcacaggcagccggcttgagtgcaaatgaatgtttaaaaggaattccaatctttgtttttgcttctgaaaggccacttaaaggttatccaatttatatcccacagcaaaatttctcaaacacttctccctgcacttctttgttctcatatattgttatgctgctgggaaggttctcatttattagccccccaaaatctctccctccatacccaagctatgtggcttcttaggctctccttctccctcctcccagctcttcatcatatcacatggatggatttcgtgcacctgtctagggtttaaggctgacctctctccgcttgcctctctgcactgacttttccagccctttctctctaagcattttccaaactctgagccaaaagaaatttcctggaacctggcaaatactgttcttcagaggtcatcatagggagtggttgggtgggcagggaagaaagtgggaagtggggcgaggatggggctgggggaaacttaccttgcttgtaactcttacagagttataaagacaaaataaaataaaataaaaattgaatgcaaatttactaagccgttaagatttaaactagcaatagtaaggtatgcggggggtgattttatgtccctggtgcctcttgcttcctctgtttgaaaccctttgcccttgaagaccatcacgttgcctttgctgaacttctctgtcaggtgtgaataacaagattccaagagaaactcaagagcagttcaggtgctctctcgacttcagcaaatagagagagacaaacacattgctctttccttgcagttccttgaggccagttggtatttcttaagtcctttctgccacctgcataaaagtgggtctattttcaaattcttgcaattcctgagtaaagtgaaatgcaatcgactagagactaagaaattccgagcaggcctgtagaaattttttttgatcaaaagtgatgtcgttggctgggtgcggtggctcattcctgtaatcccagtgctttgggaggctgaggcagggggattgcctgagcccaggggttcaagaccaggctgggcaacgtggtgaggcctcatctcttaaaaaatgttttttaattagctgggcatgatggtgcatgcctgtagtcccagctactcaggaggattgcttgagctcacgaggtcaaggctgcagtgagctgtgatcacaccactgtgctccagcctggataagagtgaggctctgtctgtctttaaaaaaaagtgatgcagttgacaaagaaaggttgcaggtgagcgctgtcaacttagagaagaaatggagggggcagccctccaccctcctgacaccctggcttctcagtcccatccttgacttactgagtagtgtaaagcaagtctcacttcaagaaatcccttatggaagaaagcaataagaatgttttgtcatcctgttttacagatgaaaaaattgacactcaggttaaatgatgcccagagggtcacagaggtaacaagtagcataattagggtaggaaactaggtctgcttttccctagactagagctgctaggaaacagcagagcatagttcctcatctgtagggcagggatactgctcccaatctagatgcctccctgggttctcaggatgacacaagatcatggttataaaagccctttgcaaaacagaacatgccacattcgtgtgaggtatttggtattaatatttaaatatagctttatacaaaacatcggaaggcaagcatgacgcatatttgtagccatgaagccaaggtaaagggccaaacaaatattgaactatcaattacacaacaccaaagcatggcataacagagtatgtccttctacaagttggctttcaggctactgtgagtcacttcaggtgattttgattggttggctagatgtcagttgttatttaaaaaaaaaaaaaggaaaggaaaaaataaattttttcacctgcgtagcagctggtggtcatgcaaagatacaggcaatcacttagtagtttggactttgccaagaatgtgaatagcattcatacaggccacattttggctttctccctgcagagggttatgaagtgtcttggcttctctgagctttctttctgttaattgtcttaaggaagagggagataaatgaatgtaaggtacctggcagtatttagtgcagatgcagggcccataggattgattatatttaatttggtaaaaggattttgtaaaccataacctatcgtttgtttttacccatttgtgggctgcgcatactctttacggggaagattttcctccaattgggagtgatgctttttcctttgaaagagctattactctctatattcatatgccatcaaatagagctgctttctttatactatttgagattaaggggaaattttaggctgtcactcaaaaattatctgaaactgggtgccagatatggtggctcccacctgtaatcccaacactttgggaggctgaggcagaagaaccacttgaacccaagagttcaagaccagcctggtcaacacagcaagaccctatctctataaaaacttaaaaaattagccgggtgtggtggtgcacacttgtaggtccagctgctcagaaggctaaggtgagaggatcccttgagcccaggagctcgaggttacagtgagctaccatcacaccactgcactccagcctgggtaacagggcaaaaccctgtgtctaaaaataaaaatcaaaaaatatgaatctgcagctaaatcagactgttccaataaaaggtctttgagactaatgcaggccagagaatggcctgaagggaagttttgggtccaccctttgagaggcacctcagagtggccttacctacctgccacccttaaagggactcagtgggctaatgtagagcagtacgaaaacgttgtgaaatgaccacagaatacttatttttcatgggaaagctagattttgaaaaaagaacaccagtgttagattagcttgaagacttacaagtggttctaaacgtgtggagacgagttttctctgttatgatttctactcattggcttctctctctctcaggaccaccgcacagtctcaagtgtagtgaagtcaggaaagactcactggttctccagtggaagccgccagtccactccgggcggactccggtcactggttacttcgtggacttgaaggaggccaaggccaaagaagaccagtggcgagggctcaatgaggcggctattaaaaacgtatacctgaaggtaagaggctgctcagttctagagcttcctctactaactgctctactaatacgaactttaaagttagcaagataaaacagaatatctccgctttgatctgtttcatatattgggctcctggtaagattccactggcagaggttggggctgggagaagtttctgatgcttgaaagagtttggttatatttaacctgaattccttagcatagctttgaaatgcacccagcagctccttcctctctcctttctctccttgcctcaacttacccactacacatttttgttactcatagtcttaaaaccttactgcttaccatccccaaaaggtgattttttcattcctcttttttctagggggatggttgatttgagggtgctgtttttataaagttcacaccaggaagcctgtgactactgatcctctcgagtcactcctgtctcacgttacctcctccctcaggccggttctcacatgagctctcagagattagtggaacaggttcactcaacccccttatccatgtcactgcctttcaggttcctctagagtgtgctcattgaaccatttcctaactctgttggccaaagactgttctgccatagccaccaaatctctcatttgtagcaaaaggaaatttcgaaagaatattttccgctagtgttagcagtggcacctggagaccctgatgccccagcggggcctcagaaactgtagggaatatgattgcattacttactacttagaatgaaatgtgactgacttcaccacagtcactcaggaagttacacactgcgtttgcacagtcctatcttttggcagaagaggtcattgcctataaggtgggctttggaagatactcaaagtatacctggccaaaaagatctctccctgacctgcctcatgaactaagtcccttccatctatcagccactctccagggttagggtatttccagccactctaaactatgtaaatatatcctccaggagatacagcccataaaccattatacccaacttgccattaactcaacttagcatatgccaatcagctctccagcttcttgcaaaactctgaagaaataagacaggtcatcttttcatgaggaagagaaaagttcaaggaaggactgaagcctatgatgttgtttgctgtcaagatgagtccagaggtccctggattccgagaaacccccaaagtacagtgtaaaataaaggtcaggaacatcctagatgatggtggtgggtgtatatggctgggatgaagatttccaagtcttcagtctgccactgtagaggatgccaagggcctgaggtttgaactgactagggtgaagcgaaacaaaggtgaagaagcaaacaaaaagaaaaaaaaaagtagagtttaaatgtgtgaaagaatggttaatgtcactcatttttaaaaagaaaaagaataacgggaattttaacagagagacagagagagaaagagagactgaggttaagtatacctaacaaacctggaagtgaacttccgtaaggagagttcttacattttatcaacagtttttataaagtgaaaataatctttttttatttttctgattataaaactaacaatttaaatgaaaaattcaaacataagaagcacaaagaagaaagtaggccaggcacggtgactcatgcctataatcccagggctttgggaggccaaggcaggcaaatcacttgagcccaggagttcaagaccatgggaaacatggcaaaaccctgtctctaaaaaaaaaaaaaaaaaaaaaaaaattagctgaccatggtggcatgtgcctgtattcccagctactcaggaggctgagatgggaggattgcttgaaccagggaggcggaagctgcagtgagctgtgattgcaccactgcactccagcccgggcaacagaacgagactctgtctcgaaaaaaaaaaaaaagggaaaatagatctgcatcgatgatctcgattacgtatttgtggtactgttgaggccagtggtcattgcccctgtggtgatggaagagcagagagtgcccctgtcaccccagggaccagacactggaatatgaacagacttcctgtacatgttgcagaaatctgactcacagccatacatcatcacctaggtggcaggtgcagatgtgtcaggtacctggcgattactctatttttattacacggaaatgtttctgtgttcttctggaaatccacagtttcctggcattatttctaaacatagaatttaaatatgtcaggctctatacatttaacctataactaagttaaagttcatttacagaataaaatccatttcaaaaatccgttagtgccagtgagggctattactacataaatagtgacattctgctgtaaacaaatacaattagttagattaaaaacctaacaatttaatacgtacctcatttaaatacatggtcacaaacacttcacataattgaataactttattccaacattgtttgatttaaatcacattttggatattggtctctatcacatcttggggaaaaattatgccctctgtgtaataaattccttcttataacatagcttttaaaagtcacatgtttttaaaataaaaatgttgataaaacattaacagtattggtaatagtaatgagattattcaaaacccaaagaaagttacaaaaaattaagtaggaaaccaggcatggtggctcactcctgtaatcccaacactgtgggaggctgaggtgggaaaattgcttgagcccaggagtttgagaccagcctgggcaacatggagaaatcccgtatctataaaaaaaattgtttttaggtagcctggtgtgctggcacatgtctgtggtcccaactattcaagaggctgaggcaggaggattgcttgatcccaggaggtccaggctacagtgagctgagattgtgccactgtactccgcctgagcaacagagtgaaactctgtctcagaaatacatacatatatatatatatatatatatatatatatatatatagacacaaacacatacacacatatatatacatacacatatacacacatagatgtgtgtgtatatatatatacatgtgtgtatatatatatacatgtgtgtatatatgtatgtgtgtgtatatatacatgaagtgggactgtcatacaaaaataaattataaatgctttttttttacagctcttagtaattctagtttagtggcacatatgtagtggattctcagcacacatcttgatcattaaaaacttgaggatttagaattttaatacactttggttattcacaaattattcaaactcacaattgtgttaatttcatgtctatttagtaagaaatagctatattaaatttacaggaacaattattgtttgttttggttttagtagtttaacatgcttttaaacaaatggaaagtgttcatgattcatgcttttaattctcctcttttgccaagaattccatctgaaattattcatggaatgtctcaaaaggattggggggaaaagcgacatatatgctataatgagcactttgtattttgtccttttgaccaaagaatacagtggctaacgcatgtgacacctacgtacactagtctctgtttctgatgttggtggccactaaattaactaaaaaggagaaacatcaaagtgagaatggatattggaaactcctctctatctacagatggtctagagagaagaccatctacagctaaagtcacctgcgtagtgtttgacagaatcaaatctagaccacaagtcttgtatccctggtgctaggtcactaaatcattactacagaggaagagccccgtctgtttaaatgacataaaacagccactgcttcatcaaacacccattgcttctacacctgcttctaccaggttcgaggcctcaaggagggcgtcagctacgtgttccgtgttcgagccataaaccaggcgggagttgggaagccatctgaccttgctggccctgttgtggcagagacccgtccaggtgggctttcaccttttcattaaaactaatcctatctgtgtaagatactgaactaaggttcggcctttctgtgctttcctctaattttcaaaacaatcaatgtgtgctatctgaatataattgataagtaatgatcttagaacatgacagtcattggtcccatcacaggcacctcaggacagggttgagccaggtttgacgtggtctaggggctgttctgatgcatacctaaaaacccggaagttcttgatcaagttaagcttcccggaccaactgttccaagcattcattcctggaatgttattcctattacaccctggccattaagtctcataagaatattttcccaatcataggggaagctagaacagcccagctagtgggcacaatccttaaacgaaagtaggatttatgtaattgtagctattatgtttaaaccagaggtcagcaaactttttctgtggagggccagataatatttatcactcaacagccctgtggtctctgtcacaacttcttaactctgccatgacacaaaagaagccattgaggatacataaactaatgagcatggctgtgttctaataaaactttatcatgcacattatatgtattatataatgtgatgcgttatatgcattataaaatttcaatcttgtataattttcctgtgttttgaaatagtaatcttctttcaattttttcaactatttaaaaatataaaaaccattcttagcttgcagcccttgcaaaaagaggtaatgggccagatttagcccacaggccatagtttgctgacccctgggctaaactaacagtggtcccaactgaatggtttatagattcgaggcagccctcatttcccagtttcaaagatgccgtgattactagagaagacagacttgccgtttcttatgagaacagagtttactgtgttcattgtccaacgagtttcagatcattacataataatttcttttatcatttaacctgtattatttttcaacgttatcatatatttcagttcattaaagttacataaaggaaagcaccggaggccaggcactgtggctcatgtctgtaatcccaacactttgggcagctgaggctggaggaacctaggaattcgagagcagcctgggcaacttggcagaaccccacctctaccaaatttttaaattagctggatgtggtggtgagtgcctgtaatcctagctgctcgggaggctgaggcaggaaaatcgcgtgaacccaggaggcagaggttgcagtgagctgagattgtgccattgcactccatcccaggcgacagtgagagactccatcccaaaaaaagaaagaaaatttaaaaaagaaaactgcacttgtatttgcttgctaactgatctctttcatctgctagaaccgtagttttcaatcttgcctgtacattagaatcatacgaggactgttttgaaaatactgctatctggactcaactccagaccaattaaatcaggatctttagggctgatgggatgatgacagaagatcagatattctaaaaaaaaaaaaaaagaaaaaaaagaatctcttaggctgggtacctgaacataggcttattgctgtttgtttgtttacttagcaatttgggtaattccagtgtgaaaacaggcttgtgaactgtactttagaccatagctcctcaaaataggaactgtgtcttttctgtacatgtgctgagagtctaacatagtaccaggtatataatagctaatttattaaatgaaaaaataatgaatgactagcatgtttgccagtgagtgtgacactgtcttgaagcctcagtgtgtgcacttcaccccagtcgtcttgtactgcctgccctggttatgatgggtgagctggggaagaaatgtctggtggaggctccaaggtgggcatgaggctgaatggtcagccgccagtcctcgtctgaaacccagggcagctcagtactacacgtgacccattacattaactcactttcctctgcttctattctgtcccatgcttcagttttttaaacatcaccacacacacacgcacacccccacgcacacccacagcatggagaacaaataattaaagcttataaaagtgatatattcatgctcatgtaaaacactttatatgagaaagaattatcatatcagattacaaaatgtataggaacgtgaacagtttactgtgattttatttaagcttttaaattttatcctttattatcattttttgtggggaagagaaagaaaagtgggatgaaatgagttaatttccaaatagttcattttagtcctgagccacacttgaacccattaggataccaggagttctgggcaagccttggagggatcattggaatgctgtcttggccctgtaatcccaacactttgggagtccagataggaggatcacttgagcccaggagttggagaccaccctgagcaacatagtgggacctgtctctattagaaaagaataggaaagaaaaaataataataatagtaatgtaaaatgagatctgttaaaatcagttatctctgtgtctgtattaaggattcgcttaggttgaggagttgactagtgacaactcttcttaaatcctttttaggcaacaacgacaacaactctctcatgttctatacataaacctcctgagatcttagttaagttcttcacattcatgagcaggttaagaggttgtttctgagaaaatctaagttatgccaaattttggtccacttttccagcccaactttgtgggaaagtgggatggcctctcatctggataagaataccacaaagaccactttactttgatagcagaacatcaaacttgcttcctgcccattaattatcagaaccacatccctcaatcaacttgagagaatatgcctctttaggcatttctcagagttcaaccataattaattgataggagctcagctctggaaaacctcagctaagttgtgggatattctaaagagaaaatttggctaggtacggtgattcacgcctgtaatcccagcactttgggaggccaaggcgggcggattacctgaggtcaggggttcgagactagcctggccaacatggtgaaaccccatctctactaaaaatacaaaaaaaattagctgggcgtgtggcgggcatctgtaatcccagcttctcaggaggataaggcaggagaatcacttgaacctgggaggcagaggtcacagtgagccaagatcacatcactgcactccagcctgggcaacagagcaagactccatctcaaaaaaaaaaaggaaaaagaaaaaggaaaatttgaggaggatgttataggtagacttttctgtcaggctttttctgtgatattgtaccaagttaatctccacaaggcactacctggtgggttagcctggggcatgttagaaattctgaaatgctgtcattggccggacacggtgcctcacgcctattatcccagcactttgggaggccaagacaggcggatcacaaggtcaggagttcgagatcagcctggccaacatggtgaaaccctgtttctactgaaaatacaaaaattagctgggtgtggtggtccgcacctgtaatcccagctacttgggagactgaggcagaattgcttggacccaggaggtggaggttgcagtgagctgagatcacgccactgcactccagcctgggtgacagagcaagactccatctcgaaaaaaaaaaaatgctgtcattgctttataggctaatatatgggctttggttttgctagggcatctatagaaagaatcatccatttgagtatcatgtaccttttgttaaattgcaatagaattttttgtctactatgtacaggacccttatttaaataattatttaattcctcatcaaatttatcaaggaggagatccagcttcaaattctgagtataaaattaagtaggaaacccactgccactagaatattttctttgttagtgtaatcgcccattaggttctcccttcccactgcatagacaaaatcaatccactgcgactgcagcattgcagttgagaatttaattgacctgaggccagctgaagcgagagacctagagttatcagtcaaatcagtctccctgaaggctcagaggttctttgagtaagggcatttttttaagagtgacttagaagaccaagatgcctacaatggggaaagtaaattgagtcacaagtcaggagtctgggtggggtcagtcttaaaaacatctaaaagaaaacaatcttaggttctacaatactgatgttatctataggagcaactgggaagctcacagatcttgtgacctctggccacataacatctaagcagtaagggataatagaaactacacctgtcttgtaacctcccattagtggtttcagcccctgaacagagaggactattatcattcttgctttcaagttaaactataaactaaccttctcccaaagttagcttagcctgtgctcaggaatgaccaagggcagcttggaggtcagaaacaagatgaagtcaactatgtcataattttgcaaaggcggtttcattggtaattttgtttcctctcacctctttatcaaaatattggtgttatactttagctttaacaagacagtttccaataaaataaatgtcataatcttaaactggcatttatcttttaaagatggtttttttaaatctcaatccagtcctgcatgtgtaaataggtaggggaaatataagacatttgtggaatttaaccctattctcaataaactaaacaaccagtgcaactttttgaaaaatgaatatccaatcaaataatcctcttagccagttttaatttttaaacctggccgggtgcggtggctcacgcctgtaatcccagcactttgggaggccaaggtgggtggatcatgagatcaggagattgagaccatcttggctaacatggtgaaaccccctctctactaaaaatacaaaaaattagcccagcgtggtggcacatgcctgtagtcccacccactcgggaggctgaggcaggagaatcacttgaacccaggagacagaggttgcagtgagccgagatcgtgccactgcactccagcctgggcaacagagtgagactccgtctcaaaaaaaaaagaaatttttaaaccttaagtgccaaatatagttttaatagtttttatttgtttcctttattgttcatttatttaataaatccaccagtagcacccacaattatgtgtgcataaattgaagaaatgttcatgcctctcttttctacccactacagatattgcttatgatatactgatttgacataattaatcaagaaaagcttcacagataagggaaactcttagatactgattgatattacagctaatccttacctctttggctctctcctagcaattacttaagtttgtttgtttttgttttgcgacaggatctgattttgtcacccaggctggagtgcagtggcatgatcattgctcaccacagcctccatctcccaggctcaagtgatcctcctacctcagcttccctagtagctggtgctacaggtgtcagccaccacatcccactaattaaaaattttttttgtagatacagagtctcattttgttgcccaggctggtctcaaactcctgggctcaagcaatcctactttggcctcccaaagtgctgggattacaggtgtgagccagtgagcccagccaattacctaattttaaattacaatttttaatgtaagactttgaaaaaatttccacattcttttctaaaaagtatgcatgatcccatttcttatgttacaactcaactataaggtaatgatgtacgactcataggttgaagttgaaacacagatgtggcttagaacctaaaaataacatcttttatttaaaaaggcaaataagcaacatcttttgtttcatttcatattttcacaaaagatctcgaaatgctttacaaagtttatttttcagaatacagttatccctctttatcctgggggatcagttccaggaccccctgtggataccaaaatccaggaacactcaagacccttcataaaatggcatagcatatgcacatagcctacagacatcctcctttatactttaaatcatctctagcttacttacaatacctaatatgatgtaaacgctatgtaaagagttgggatactgtattgttttttaatttgcattgtttttattgatgtgttgttacttttattgttttttccccaagtattttcaatccacagttggttgaatccacggttgcagaacccatagatatgaaggaccaatgtacttcagtgattcagctctatattctttgctcagtaactgaggcaattgagacaaaaactaaacgggattttctttcttttttttgagacagagtcttgctctgttgcccaggctggactgcagtggtgtgatctcagctcactgcaacctccgtctctcaggtccaagcgattcttgtgcctcagcctctcaagtagctgggattacagacatgcgccaccacgcctggctaatttttatatttttaatagagacagggtttcaccttgttggccaggctggttttgaactcctggcctcaagtgatccccctgccacggcctcctaaagtgctgtgattacaggcatgagccaccatgcctggccaggattttcttattctccaagtttcatgggtttgggaccaaatttggccattcaaaaacctgaacaaattattgttttagatgaccatttgttccatttgcctgagggtttaccgctaaagcattaatactttaaaatttcatttaagactttctgatgaaaatcgttttaaaataaagtatgcaattcaataagagcttttcatccttcttggatgcagtatactgaatcttatttacctttttctgtgactcagagccgtaagtatcacctttatttaatacacagtgttgtgatacagcaatgttgttatggggtggagaagctatctgcccctatagcaaataatgtttttgtgcctgctttttagtttttctccctcctttcttgctgtcattttctttattctcaatgctcctgctcatagtagcttcttacctccctgtctttttttaatctactgagagaaaccaaccaagtaggcttgttagaattgtctcaagcaaagtataaaaagactccaaggctgggcacagtggctcatgtctgtaatcccagcactttgggcggccaaggcgggtggatcacttgagctcaggagtttgagaccagcctggccaacatggcaaaagcctgtccctacaaaaaatgcaaaaaaattggccggatgtggtgccatgcacctgtgatcccagctacttgggaggcagaggtgggaggatgacctgggaggccaaggccacagcgaggcaagatcacaccactgtactccagcctgggtgacagagtgagaccctgtctcaaaaaaaaaaaaaaaaaaaaaaaaagattccaattccctggtgagtgtgcagcatactagtgtgtggactttgtcacatcagaactggtattagaggcttattttccttatttcttggttttgggcagttttccaaatgggtgaggtgttacactacaaaagttatctacagcatttagagaatggcgaggctgattaaattgttcgtattctttctgttttgtggctattttgttttcagaaaagtcaaatctttcacaatcaagattcttaagctaaccaatatttttgttgtacacttgtcatacctctaatgtaataaacaacaagcatatggatgattcacttccttttaaaaagggatcacagatagaacaatgaatgattaatataagcaatctgtcatgcttccaaaatagagattatgcaaaaagcaagattacctcacttcttttctctctgtaacaatacagatatacaaaaatttctgtttacattctttctgtgactcagtcacacaaactgtatattataatacagtctaaacctcaacactcttcagtgttagccttttcttaagttttaataaaagcatttgttcaacatttattatacgaaaatagagtgtgaagattagtcacgtgttatcaggaatagaaataaaatgtgggctgcaacttacaatggaatacatatagccctttaaaagtaacatatggtggacaattaaggaatacttaagcctttaattgattgttatttcactttatgtaaccaaatatgaaagtagccctttgtttaagaaaaaggaattttaaaaaattttctagaaccagtcttctctaagctttgcatgtgctaacaatcactttttggaagtttatagttgaagcatacactgccatctgtacggacacaagttagatcaactatcaggctcaggaaccaagatcatcctgccaggcacaatttgggcactggtttcctcttggccttcccttgggaaaacgtttgcaattttttttccactaacaagttttattggacagtaggccaggatgttggcctcttgtaatacaatccagacagaaaatattcaattcttttggaaggtttttttatgctttttaaaaaaatacagctgtacttttctgggattaaatgtaatatattttatatatatttttcctaatgtactgaaacaaaccaagtttagactggcaattgaatgagtataaatctgagtagagcattttactcctttcaactggatttaggcatagatgtgaatgtttcatatgctgtacaaattctccttgaattctctattaggtgcaggtgcaatttattataactctcaaaaatagaataactcaaaacactaactgaattttttttaatccaaaaaccaatcttcctgaaagagctgaatctcttgaaactcatttccatttaaatttccatgcagttcaataatagtcatttctcagttgctatcactctaatctagaggggcatctttaaattgatttatggttctgtgatccacagagcaggcatccatatatttctccactcttaaatgacttaaagactttgaatatgtgaatataggctattcttagtctctctactttctcccattcaatttccttttgggttcttcatctctatccttccctgatgactgattgcatgcggactttctcccattcaatttccttttgggttcttcatctctatccttccctgatgactgattgcatgtggatattgttgaaacaaaagtcatgaatgagggtctgataaagatcaattgactttcccttttcccaaagctgccttgtttcctcattgcaatcaatccactcccataactgtaccatcagtcacatcacaaacaatactgtccatggtgttgactctacctaagaaatgtggtgcaaccatctaatttcatgttatggcataaaagttgaattgtggagtaggactgtccacctgcatgagtagtgaagcttttccctgacctaggatcagggccctactttagggttaaagtaaagaatctcaaggtaacaaattcttacttggttgctttcctccacgaagtatcagtgccttctttttgatcttgtaggaaccaaagaggttgttgtaaatgtggatgatgatggagtcatttcattgaacttcgagtgtgataagatgactccaaagtccgagttctcctggtccaaagattatgtatccactgaggactctccacgattggaagtcgaaagcaagggcaacaagtaaggactatgtcaatcacaatcatgggtttccttttcactgtaggagaatgaggtgagctctgatttccacttaaattgcttggaataagaggatgaagtcacttatattttatatctggtattgtagaaaataataaccaacttaaaccttaaaaataatcatcctaggccgagcgcggtggctcacacctctaatcccagcactttgggaggccaaggcaggtggatcacgaggtcaggagatcgaaaccatcctggctaacatggtgaaaccccgtctctgctaaaaatacaaaaaaaaattagccgggtgtggtggtgggtgcctgtagtcccagctactcgggaggctgaggcaggagaatggcgtgaacccggaaggcggagcttgcagtgagccgagatcgcgccactgcactccagcctgggcaacagagccagactctgtctcaaaaaaaaaaaaaaaaaaaaaaaaaaaaaatcccagactgactcattggctcacacctgaaatcctagcaactcaggaggctgaggcagaaagatcacttgagcctaggggttcaagaccagcctgggcaacatagtgagtccctgactctaataaaataaatactaacaactcttatgaaatactttttacattattccatttaaagtgctttcttatttattatctcatttatgctattagaaacattcaattgacataaagatcagctttaataatgattctcattatctatgaaattttgaaatcttaaagtaacaataaggatacttatagggggctaggaagaactcgctggttcaagttatggtaaattaaatggattgaggataatcttttctgcttttttgatcatcactcatgcgtgacacaatagtacatgggaagaaagctctatgtggaagtataagatgaacgagctctaggcccatctctaccaggagctggctatataaccttgggcagctatttaacttccataaacctcggatttctttttctataaaatgagcatggggagaatggaggaattgtatgatctatcattgcctttcaacgccaagattttgagtattctttttactttgctttatagcaaaagcttaccaagctttgtattttcatagtgtcaaccacattggattgatatgataaagcaaatatttgataaagcacagtatttctaagtacttttttctattacaatgaagcccagtgtgtctcagaaatcaaagaaaaaactagcaattttgctgtagaatgacaaggaaataccaaatataattaaaggatgtttttctgccaccatgctgtaaatttcttgacataaaacacatttgccccaagaaaagataattgaacgataattttttctcccagtttatacacttaacatttcaatgtttggttgatcttagacactgcctagcaatatagcttaccaaagttagaaaacccagtgaacttggccactgagccattcatttacttattacacatactatgtgccagacaaggtacagggtgctgggggtgacacagtaaacaaagcagttcctgtctctgaaggcacagggattacacagtgaggagaatacagatgctttgagctcaagatgcttataataagttcagaaaagggaagagcaggagatggcataggagaggcacccagagttaccaacagcaggttctgcccttggcgggggaagtgtctggctcccagcagggactgatcagctgggtatttttctgcaggatatgcactgataagcaacatagcttgggcatgtggaatttgtgccagttccactctcccgtcaccatcaccccctggaaggaggtaaggaaagtcctcccagagtaaatgacattgaatctgagacaccaagaacatgtaggctgtagctcagcaagatgagaggaggtgtccagatgaaaggagtagtatacacaaatgcccagattcaggggaaacacaggcccacagatcccacacagcctcatttctaagaaaaatattttgttccgaaggacgaaaatgaccttcaaagaccttgggatggatgacttgggtatttactcttgcgatgtaacagacactgatggaatagcatcaagctacttaatagatgaggaaggtaagtttaaaatcagtgcattcacacatcgaatgttgctttgaattctcagttattcttaagtgacttttattttagtagtttaaggtttaactgccttctttttccccctacagaattgaaacgtttacttgctctcagccatgaacacaagttcccaagtaagtatccacaatacattcacaggtttttagcagtcttactaggcagcaacttctggaatagatcagatgacagctctgatgggattaagagagagactcttgagaacatataatggaacacacatcagtagctacagatgtgctttctagaagtgatgccttttcctttgcggttgttctccagagataccaaggatactaacatagaaaatatatcccatgctccattacatggcgaagtgtcaggctacacaggtgtaacatctgagtaattaagttcttcactttttgcccacatatgttggaatcacatatatattttctggatatattcacttatatgtctttatgcaaactaatcttttcctaagtaagattggcacttaaaagcagaatcatacctctaaataaagacaatataaagacagtgcctaccattttcaactcctggaaaattgggcaaacatgccttcgtcagaaaaagaatccctctgaacaatgtacaacccttcaataaagcaccttctacataaaagattaaattccacacttgacactaagagaagagaaggaagtcagaaatgacccttggaaggttccactggccagatggggggatctcttgccattagtacccactggccaaggtagtgaagcatccagaaagttgcaccctggagtttgagaaaacaagtagaaagtgatagtatacacccattctttttaaatcagaaattttaatacttaaaatataaatcctccactaataaaggagtttcaggaacccagaaaactatattcctattccagactatggacaaacagcctttgtatattgatatatgtgcatttttctaggaagagtatccttcacttttagtaaattccccaatggagactgtaatttaaaaacacacaccactgctctagaatgaattgcggaccttctcttacatctgcaaggagtgacttgtttgatagtgaggctgagtgctggtgatattggcctcagctgtaatgttctcaaaaccaactttggctgggcacagcggttcacacctgtactcccagcactttgggaggccggagcgagaggatcacttgaggccaggagttcaaggctgcagtgagccatgatcacgctactgcactccaccctgggcaacagagcgagtccgtatctctaaaaacaaaaactaacccaactttgttcagcaaagtagcagagtggagggcccatgagacacgactgtagggcgcagacttctaaattctagggaagaaccctctatgccaccatgtggcattaggcaagccatttctcatctgtatgcttattcaccataaaactggaaaagtaatatcatgagtgaggtttcaaatgttaattttgaaaaagtttatggaaagtactaaagtgtattgcaaagtgtttggactggactctctttgttctggacttttgactcaagctgtgcgcctgggcagctcacttttatttctctgtgccttggtttcttttccaggaatggctatcacagtggtttatagcacctcccatatagaaatgctgtaagagggtggggtgtggtggctcacacctgtaatcccagcaccttgggaggccaaggtgggtggatcatgaggtcaggagttcaagaccagcctgaccaacatagtgaaaccccatctctactaaaaatacaaaaaattagctgggtgtggtggtgggcgcctgtaatcccagctactcaggaggctgaagcaggataattgcttgaacccgggaggcgaaggttgcagtgagccgagatcgtgccactgcactccagcctgggtgacagagcaagactccatctcaaaaaataaaaataaataaaaataaaataaaataaatgctgtaagagataataaatatggtattgatgaatccatgaactattcaggaaaaatatgaacattaattgaaacagaccagtgatccctgaacctgctgcccaacgcagaagtctccaagctacataagatggttgtactttctactctcgaacattgacagaaatggggagaaacagcagcacctactaatctagtcagataataaacattgattaagtgtctagacaacaactagtccaaacaacatttacattcagcttaaaggttggagatgagagaagatggggtgtcacttttgagctcaagatgcccaggcctccctggagtttagtgttcatatggacttggagagagaattagtccgggcagtaggcattgcctgatgtcattatcatttatgctgagatattttatcttgcataagcccaagaactctgattattggtgctacgagagagggtagcagcaaactcagttatccttttattagagacccagtgtcgcattttggtagagagaccctgagaatgtgattaaaactctgacattcggctgggcaaggtggctcatgcctgtaatcccagcacttaggaaagccaaggcgggaggatcacttgagcccaggagttcaagaccagcctggtcaacatggtgaaaccctatctctacaaaaatacaaaaattagccaggtgtggccgcagctcctcgagagactgaggcgggaggatcacttgagcccagcagttggaggctgcagtgagccgtgatcatgccactgcacttcagcctgggtgacagagtgagaatctgtcacaaaaaaatgagtataaaaatcacaaaataacaaactctgacatgcaagtatcagagcccccaacccaagggtgttttggttaacccaaggaagcaacatttttcaatactaaaactccagctcttttctttcccctaccactatcagaccaatgaggtcacaaggtgaatatcttcagaggtctggtggtaggatcaaagtagcacatgcaatttcttgattcatacccacttcctgttggtaaatgctggcatgttgatgaagtcgttttcttgagattttgtaaagttttaaactgtcttatttcttagagaatgtaataaagagtatagtattcctttatcctttggcacagtaaattctcctattttaagctgttttcaaaattattttgaaaaccactaaacacgtgccttaaacctacaaataacatatttcgctgaggcacattaactgccagagaaaagagcctaaggaaatttggagctgagtaaatagaaaaaatagaaatgcacaaagctaaaaatagaaatcgacttagtctatcttgccagtattgatactaaattgcagtgtggaaagatagcttatttgaatatatatccatacaccaagaattcaaggtattttgagggggtgggtggagggtacactttggtattatcagcatgctgcataatagcccttcatttgcagacaccggtttttacccctcttgtatacatgcactatatgtggggaggcaagcacaagcacgtatacataaatacagatatgttggtgtgtcctcttaggtgtcaacatattatattctaaaattagtggttgtaaaatttaaccaggtgtggtggctctcgcctgtaatcccagctactctggaggctaaggtacaagaatctcttgaacctgggaggtggaggttgcagtgagccgagatcatgccattgcctaggtgacagagtgagactccatctcaaaaaaaaaaaaaatggtgtttctagggtgttgtagaagcaactagaggaggagagagataacaaaatattaacagccaacattaatagagcatttattatatgccaggctctttatagagtatttaagcagtatatattatttgaattccacaatgaccttaaaagggttggtattgtggcgatttgattttagaggggaagaacatgaggcccagagaggttaagtaactagatcatttgcaaacagctggttaaacccaggtggtctgcctctggagcctgctcccctgactgtgatgtgggctatctctatgtaggcacggccacatttgctccgtgcccactgtggacattcaaggcggccagcattccccagacgatgttctcaggactcagggaggacagtgaacattaagggagctggagacttccaggagggcctgttcctcctcctccctcatcactctgggcctcttaggtaacctcctcactcacatagtaagtttcctagaatgaggtctccagatatttttagaagaaattgtgctttctactctcctcaagacttagttgtagcaagcatgagcatcctgtaagggagaagcttagcctctgcccttgctgccctggtgcactcagacatcctgctcacactggaaaaccaccgtgtggacaacgaggaccaagaggaatacagaagagagggagtgaccctgctctcagctccaccacccagacgtgttaccactgtctcctggggtgcagttgagattttgtaaagagaccagtaaagtgaggggaggaagataaccaaccttcttgaacacagaccactattcacagtaccttaatgtgttctcttactatatttacatttgtttgtttgtttatttatttgagacagagtctcactttgttgcccaggctggagtgcagtggcgcgatctcggctcactgcaacctccgcctcccaggttcaagcagttctcctgcctcagcctcttgagtagctgggatataggcgcccaccaccacgcctggctaatttttgtaattttagtagagatggggtttcaccatgttggccaggctggtctcgaacttctgacctcaagggatttgcccccctcggcctccccaagtattaggattacaggcgtgagccaccatgcccggccttatatttactcttcatagcacatccatgttagcaggtgagggacacgaggtctaaaggaggagagtaactggtccagatcttggtgggactccaaagcccaccttctctccaccttgaaaccccctcaatagatgacatctgagccccctctcagtcctgcattggaatgaatgtatcacactgaacttggtagtgaatatggaataatgcaaagaaaatcatcccttgaaacttgaaaagggtagttttaaaataaatacaaagaaatattaatttacatttgacataagtttaggaagcttctaatttaaaatacagcacatgccaactagatgaggtggctcacacctgtaatcccaacaccttgggaggccaaggaggatcacttgaggttaggagttcaagaccacctgggcaacatagtgagtctctttctaataaaagaaaaataaaaaactagccgaatgtggtggtgcgtgactgttgtgtgagctactcaggaggcggaggtgagaggatcgcctgaacccaggaggcagaggttgcagtgagccgagatcatgccactgcactccagcctgggcaacagagtgagaacctattgcaaaaaaaaaaagaaaaagaaaaagaaaaaacaccaaccaaaagccacagtagaaagttacagatattagctacaagtgcccctatgcccctagaggtaagttcatcttcctcatttttacagttgagacaactatgattcaaagagaatgaacaacttgctccaagtgacagtcccagcatcagagctgagtccctctgtctttaatctaaggctttccctgcaactctcactgcctctgggctttgcaagaagcaggtgctacattgtcatttccattgtgtggtttttttttttttttcacttgatggaaaatgagtaccaatataattggttaccaatataattactgtgtttatttttacttttcatagctgtcccagttaaatcagagttggcagttgaaattttggagaaaggccaggtccggttttggatgcaggctgagaaactgtctggcaatgccaaagtcaactacatatttaacgagaaggaaatttttgaaggcccggtaggttttacactgtttagactttttaatgtatcattgtagaatacactgaggaagccttatgtggatgtggatatgttgttataaaaaccgctgggtggtggagtgggagagtttaaatccttctcacaagtgaaaactgtgaaatgaaaatacagattgactataacatattatgcaaactgggacgctttgagaatgaaaggacaacagtcataaatagtcataaaccaaaacggtctcaggcaaaccgagatgtatgatccccatgaaaatagagaggctctcctgggaggcagaggagcccataccctaccctgaattcacatcttactcacactggacaccccagcacggacttgattcattatatgaagaataggcctcttgtcccaatggctctgaaaaatgcaataaaaatacctttcattgcttttctggttaaaaacacgatacatccttattgtaaaaagcattaaagactcagaaaggactaatcacacattcttacggcttttcttaatttggtggtggtggtggggagtctttccagcaaaaaccggaaagcctgctagacaaattctaaaagagctgtaacacttcttatggctttttgatgtacatattggtatatacttttttagacttttttctatgcttctctgtgtgtacgtctgtttgagtcatatttacgtaggtgattttgtatatatataaaatactctttcctttccttttaacataaacatagtttttgtagatagagttacaacatctaagttttatttgtcctccccacagatgtcagtcaagtcaagatcaggccagtgcccagcagtactgaagaactgggggttcaggggcactgacctgtgctatcatgggtgtaaatgggaaactgaaagggcagaggaggtgtggtttgtggccattagtagcaaccctttcccttttcactgagatgtatttttaaaacatttgaggacttgttagtgagagggaaacgagtaccatgaatattaggagagtatgcagtatagtcctttccagtgcatagagtgacttgctgtggggccagaacaagtcactcctgactcctgtgtccactgcgacccgtctcctctccactttcaaaatgttccctcgactgctgtgatcaccacctggtcaggggagaggaaggaaaagtgttgttggcctcactcatcaccccacagccattgagtgaacattcatgcatatgtgcatatagacgtactccccttcacgtgttcaagcgtgcatacatgttgccttgagggtatgcagctgctctcttaagtttcttagaaagagagtctgaagtagtttctcgttcaagtgatttattgttggggagcaggataggatggggggatgctaagcaaaaatgtggtctcagttggagactgacttcctgcaggtgaggctcgggagcatgaattgcatcacagagttcatcccagacctgagccttcattctgtgacattttatatatagcaaaagttaaccaattcaaatccatcatggtatttgtgcttgcatgcctagcaactaaaacttatctttacattctgggaaaaaaaaaagttgtctaaacaatatgataaaataagtatagtctaatagggctatttccattcattaagagcaaatagggccagtcatggtggctcacacgtgtaatcccagcactttgggaggccaaggcaggggaattacttgaggctcagagtttgaaaccagcttgggcaacatagtgaaacctcatctctacaaaaaatttttaaaaattggtgaggcatagtggtgtgtgcctgtagtcctagcctcaagatcctgaggcctgaggcttcagtccaggagttcgaggctgcagtgagctatgattgcaccactgcactccagcctgggcatcagagcgagaccctatctctaaaaagagagagtaaacacatttagaagcattttttttcatgtattagttcagcagatatttattaattgactactatataccatgtatgtgcaagatgccaaggagatagcgatgaatgagcaagatacctgcctctgctgcctatagttttacattattctactcattaaaaataatgtaggccgggagcagtggcttatgcctgtaatcccagcactttgggaggccgaggtgggcagatcacttgaggtcaggacttcaagaccagcctggccatcatggtaaaactctgtctctactaaaaatacaaaaatcagctgggtatggtggcacacgcctgtagtcccagctactcaggaggctgaggcagcagaatcacttgaacctgggaggccgaggttgcaattagccaagattgcaccactgcactccagcctgggcgacagaacaagaatccgtctctaaataaataaataaataaataatgtaatctggaaggtaatgtgagagtctaaagacaactttttgacattttgtgacttggggtaacaaaactttatttagatttaagaaactaaatttcagactttttagtaatctattctggtctaggtcataaactccacataatatttccctttacctgggtataagaatataaagcacttgttcagttatgaagagattttatttaaattattattctaatttttaatgtttaattttttttttttagacatggtctccttctgttgctcaggctggagtgcagtggcacaatcatggctcactgtagccttgacctcctgggttcaagagatcctcccatctgagtggctgggattaaaggtgcacaccaccatgcccaaccaatttttcaatgtttttttttttttagacagagttttgctcttgttgcccaggctggagtgcaatggtgcgatctcggctcactgcaacctctgcctcctaggttcaagcaattctcctggctcagcctcccaggtagctgggattacaggcgcatcccaccacaccaggctaatttttgtgtttttagtagagacggggtttcatcatattggtcaggctggtctcgaactcctgacctcaggtgatctgcccacctcagcctcccaaagtgctgggattacaggcgtgagccactgtgcctagcctatttttctatttttatatagacaaggtctcgctttgctgctcaggctgttctcaaacttctggcctcaagtaatcctcccacctcgacctcccaaagtactgggattacaggcatgaacaggcactgcatctagcctttggggtttatttttatttcatcaagcttgttgtcattccaagtaaaatatatgcctcagtgatttctctgtcattttcttttcacactgaagaaatataaaatgcatattgaccgaaacactggcatcatcgaaatgttcatggaaaagctacaggatgaggatgagggaacgtacactttccagcttcaagatggaaaagcaactaaccattctactgttgttctcgttggagatggtaagaattccgtggaacattaaccagcaggctttgctactcccttcaatctaagtaccccatggcacaaaagttgttatttgaaaggtagtaggaattttttcttaattgacttctaatgttcaaaatacaattttcagctgggcgcggtggctcatgcctataatcccagcactttgagaggccgaggcgggtggatcacctaaggtcaagagtttaagaccagcctggccaacatggtgaaaccccgcctctattaaaaatacaaaaattagccaggcatggtggtgtgcacctgtagtcccagctacttgggaggctgaggcatgagaatcatttgaacccgggaagcagagattgcagtgagccaagatcgcaccactgcactccagcctgggggacagagtgagaccctgtctcaaaaaaaaaaaaaaaaaaaatacagttttcagttaatactttacatggtattttatttcatggaaatgaaagtgaatttaaaggaacaccaaatttattcctagctcacaggcaagactgcgtttaaatactttcatatataaacaaatgtttattgctaaaattctccagtgagggagattgcaatacaacaaagactgtatgtgtctcagaaacaaaccatgagactgttttgccacgtgtacttactgtaaattactaaaattgagaagaaaaatatgcaaaagtagtgcctgccgaatctactaatcatacattgtaactggattgtagtaaatcagctgctcacttactaccacccagatttaaaatgtggcagttacgaaggcaatggaaaggccggccagatctctgtatttgcaacatccaatattatgtcactgtttcctagctttatgaccttgtacaatttatttaaccttcctaagcctatttcttcatctataaagataaaaaatgagcagggttgtcacaatgtatgagtgttacaataatgaatataaatcacttagtgcagtggctgacatgtgcatttataccacccaactcaatttcacacttccttgtttttcaatttgtagttttcaaaaagctccagaaagaagctgaattccagcggcaagaatggatcaggaaacaaggtaaaaataggccgtggataaagagaaaatttttaatttttttgtacaaaagattccaaggttatttccataacaaattaaaatgaatattattgattatgttaataatgcctagtaaattaaaataattaaaaatatttactgttaaatatgtagacattaaaatatttaaaagctaaatctagaattttaaaaatctgacttcagatgtaaatcaccttaggacttaagtgtgagctttgattttgcatttgtgattaatagagtaattgctaatgtcattaaaattttataggtcctcactttgttgagtatttgagctgggaagtgactggtgaatgtaatgtactattgaaatgcaaggtaagaggtagataaatttttaatatttgattcaagggaaataaaatagaatgtagagaagaggaagctcaatttttcatctcttccatctgagccaaaatgataagtgggacacatatttactgttcaatgttactgtaaccatttgttgataagaaagatttaaaataaaatgacataaaatatgacaaggcaaggtgatcattcctagtcactactcatgatctagttagtaacaccctagacttttatctaattagtaatctccaaagactctcacgtttttgttttaagccaaatctgtattctaagtcatagacctattccagaatcactccagctgcaatgtttcgtggaccttgccatgtaaattgtgaggctggtgcaacaatacccctgggtattccccagctgtgccactgactccaagggagacatgtggaaaagagttggcagctcacaaccaattgtcttattaggactttggaaagattcaggaaaaaaaaattctatacagcattctaaacaagtttgtactttagcatgtggtgtgtagctgagtcatcagaaatgttttgggtaaggaaccggtgggtgaggttggagcgtgaaggtcctgctggctgacaaggacaggtggaagcataggtgtggcatttggtctggatttcacaattgtcatgataaaagccagaacccaagtgccccagtgtctactagatgtgataaactcaaagaaacagcagtctatcagaaatacatataaggaaaatcagttctaggttttagcctcacaggaaatggcaacgctgcttgaaaaactctttctctggcagcagctgaagccctcaccttctctctcatcccagctgctccgtcttgctgtcccactcacttcttcatttgcgtggcccctccctataagctatcctttttcaaaagcccacacatccctcgccttctgcgcttgctgtttccctctgcaccagaggagctctggtgtcctgtgatggccttcctcaggacaatcagccccatacccagattctgagcaaccaagggcagtctggaaatggattgtgaatattcacacagttctgttatgctgtcgttccaatgcctggaatgacgttctttcagcttctctgacaaaatcctttcccaggcccagctcagtcatctctagaaggcctcccgcttcctctgtcttcgcatagctctttgttccgttactgtggcaattcctgtaaatttagccactcacgtgtcgcattacagttcatggagtatgcgcagcgaatcattcagactcactggagtatcgtgggtcttgcttggcgctagtctactcaaaaaaaaaaataaataaataaaaagtaggaggggcagggagcggtggctcatgcctgtaatcccagcactttgggaggccaaagcaggcagatcacttgaggtcaggacttcaagaccagcctggccaacatggtgaaaccccgtctctactaaaaatacaaaaattagctgggcatggtggcaggcacctgtggttccagctagttggcaggctgaggcaggagaatcacttgaacccgggaggctgaggttgcagtgagccgagatcatgccactgcactccagcctgggtgatagagtgagactctgtctcaaaaaaaaaaaaaaaaaaagaacgtaggaggaaccctagcttgcacactgggaccttcctctccctcaggagtccacatgtggagctatgacctttgccatcccggacaacagaaagctcagatgcaaggagacaagatccactttgggcaggtgcaggaagtcaccacggctttaaaaaaaaaaaaagcccaaaaaaacttcatgccctgaggaactagtatcttttctaacaactgcctaaacagagcttctgggatccacacaagggatgtgtccaaatttcatgagcaatgtactcagcaaagcccaaagctgcggagtgcatttctagtcctctgggtccagacacagctttccaatcgaggtcatttttatcgtaagcaatgtcagctggtaacacactttctacaattcaggaaccagtttccagggtcataaagaatgattgtgtgtagtggtttcactacagttgccagggtggttcctatgtttatttattagctgaaattgtttcacattttaaaacctgtatattgtcacgtataatgagacaacattgtctttgtctgttggttttatggttgtattttctctttggggaatggtatgtagttttcacccattattcagtggggtctttgagacggttttcttgatttgtaggaagtctttactttttcatacaatttgaattatacaagaaatacatgagtatattctcctttgtaaaaaaaattcaagcattgtagatgaaactcaagatccctttaaccatatgcagttgtttagtccatttgaaatagatgatatgatgagaagattagtgtatctaagtgagtctcctcgaaattgctaagtaattaatttacttagcatacctcccctccacatatatttgcaatgcttcatttatctttcattaaacttttagatatagattggcgcttactcattctgttcctttaataaagccatttgtttttgtaacacagcctgtattttaatctgatgggatttttctccctttggttttgtgacttctattttcatttaagtttgtatgtcagtatgaatgtatctattctctcttttctttcctaccacatgattttagagtcaattttcactgctggaaatagagatgctattgatttaggtttattcattggtgtccacttgattctaaactcttttctcaattaaaatagttttcaattcattcctttagaaatctgtgtcttctcactccacgttcagtgctttttcttttatatcttgctgcattaagaactattcaacttcacaagagtacactttcttattttaagaaaagtaattatggtttttctcctaggtggcaaatattaagaaggagactcatattgtgtggtacaaagatgagagggagatatcagtggatgaaaagcatgactttaaggatggtatatgtaccctgcttataacagaggtaggcgattataaatgtaaaatgtaatatattagctctctaccctctatcttaccccaaaacagtaactagattctgtattcctttcatgaccaggggatttatattagcttacttccaactgctgtaggaacacaaaagcttctctaaccttgtgatgtgtgtggatttgttaggtagcaaaccagtatgagctgaatgccacaactcttgcttttctgagttgcttttatccatatatgggcagtgaagtggatcattcttcatttgtgcttaagcctcgtggtcctaaaagtacagagacatcagacatggtattcatttaaggatagatttttatctacttcttgtctaaaagagcacagcatttaaatatatcactataaaactagtgatcactagtttttaataaatgaaggcagagtaaaaagtaaggacattaagcctcatatcaattacagccttggaaggtaaaaagtcaggactgctagctcgctggtcaaattattatggagaggtgcatctctgcatctgtgaacggttcaccactcacaagttagatgcttgttcaaagagtgttttgatggcaattctgtaaatcaagggcctttaaaaatgcagatagcaggtgaggtgcagtggctcacacctgtaatcccagtgcttttggtaggtcaaggcttgaggccaggcgttcaaggatacagtgagctataatcacacatctgcactccagcctggctgatagagtgagacccttgtctcaaaaaaaaaaaaaaaaaaaaaaaaaaaaaaaaaaaaaaaaaaagcagcagcagcagaagaagcagaagaaaaaaaaaaatcacagataccgtgccctggggctacgaaaggtgcaatgtggtatatctattcccccttagttttccaagaaagatgctgggatttatgaagttatcctgaaagatgaccgaggaaaagataagagcagactgaagcttgtggatgaaggtcagtccaccaactgctggggtctgtcttgtgtgtttctgcatacagcttaccagaatgatgattgaggccgagctgacgattgaaatcatgctgattttttttgtccacagattttggcttaattgaaattccaacagagtgaactgttttattcaaaaatacctcacttctagtcatcttcgaaatcagaagtgtatttttgatccttagagaatttatagtccagagtccacaagggatctgttttcaatttaaatcatttttgtttcaactctataaaaatgttccaggctcaaaaacttctgtgagaagcatgacaaaaaatagtccactctaaaggtagcaagcaagatttatatatgaaatgtgaagccttgcagtttttagcacagcaagaaagcaaattccatttttcagagactactaaggacaaatatatcatgatgatgaaaatctacatgggaactccaaacttacaattttgttcctgaacaagatttttaaaacaatattgctaacaaacagcagaagtctgactaatttcaccttcctactttgggtggaagtggggctaaatgtgtttattggcaaaaagcattatcaggctgatgaaggccaggagacctacatggttaattcattatgaatcgatgacacggctaagaaaatgtcctctaatgtaaactaaggcttcctgggaattaagaagaaagagaatcccaaagccaagaaccttcctagaaatctcttgtggccctttctctagaatgtaaatatggcgattgtgacaaagaattcaagggaaaaaaaatcaaaataagcagggatcttttaaaacctgataaaattgaactatttcctcaaagaatactcattatcagtgggtcgacaaattcaccttgtttccatttcctttcaaccagaaagggaatttttgagagctaagaatttgagatttaaccttacattgagaatttttatgctaaagttttggctctgaatctctctccacagcctttaaggaactgatgatggaagtatgcaaaaaaataggtgagtcaaacatttcgcaccacaacaatgctttatgatcctcctgccaggaggggcatgcagatgtatgaaatatgctattttcttctttcagctttgtctgctacagacctgaaaatccagagcacagccgagggcatccaactgtactcttttgtaacttactatgtggaggatttgaaagttaactggtcccacaagtaagtaaatgagaacttacttgctgtgtagaaattctttccctgccaggcgcggcagctcacacctgtaatcccagcactttgggaggccgaggcaggtggatcatttgaggtcaggagttcgagaccagcctggccaacatggtgaaaccctgtctatactaaaaatacaaaaaaaaaaaaaaaaaaaaaatgagctgggcgcagtggcagacacctgtaatctgagctactggggaggctgaggcatgagaattgcttgaacccaggaggcggatgttgcagtgagccgagattgcaccactgtacttcagcctgggtgtcagagtgagacactgtctcaaaaaaaaaaaaaaaaaaagaaaaagaaaaagaaaaaagaaaagaaagaaagaaaaagaaattctttccccactggaagaggggaggatagggaaaaaatttttctgttcttctcaagtaaggagtcttcttaattctcaagtctgacattggtgagcccaggagataaacatccaaggcattctgttactgtgaggttagctctttccctcaacatgtacatgctgaggccagtcatagttacagtacatctttctttgtgatttaagaagtaccataattcatagacatctctataatgcagcctccacctccagacagtcatgcttgggctctctctgctgtgccaggcatctggagccacattcttacctttctttctatacacacggttaacacatctgtggtctggaacagaaatgaagcagtgtgcaccaggaggcaccaaatttcccatgatatgaatgaatgggcattcaccaaagaagcctaatccaacgagtgcccaagattattgttgttgttatagcatctggcagagtgagacattagcatgtttctggtccactctcagaaggctttggagatctcaagttgactttggggaaggtgagtttgaacctctgtgcagttatacagggactctattcaagttcacttctgggattccaagagctgaaatcagtttccaaatcaaaccaggcctcccatttacactcttgacagtgtccttaacctctgtgtttccttgaaatatcctgagctgaaagagaacggaggcctggcaaagataatccaatggaatgtagccacattcagtccaacttcaggatgcaaatgttccaaactgcaaatgttcctaggagccccactgagaagaaggtcacatggcatccccaggagggtgcagataataagtttccttacactgtaccctcagtggcattgacaatatggggggcactgctcaaagccctttacatatgtgaattcatttcacattcaccattctacatggtaggtgctcctcacttgagggatgagggagctagggctcggggaggtgaccggcctaaggtcacacagctaagaggtaggtcaaggctgagcctaggcagcctggctccagagcccggttcatcatggtactacctgccactggattccagccgtgtgaagtctagattagagatccccaaaccccaggccatggaccggtaccagtccgtggcctactaggagctgggccgtgtaacaggaggtgagtggtgggcgagggagcgagcatgaccacctgagctccgcctcctgtcagatcagctgcggcattagattctcataggagcgcgaaccctattgtgaactgcgcatgcgagggatctaggttgtgcgctccttataagaatctgatgataaatgttatgtgcttgagtcatccccaaacccacccccgacctggtctgtggaaaaatcgtcttccatgaaaccggtccctggtgccaaaaaggttggggaccactgggctagattgaacagttagccagagccaggccccacaaagcagccatttgtgttttctttaagatgactttactgttatataaaacagtgttttcgttagtattatgatttattatttcctgagtcataaaaatgagaattagtaaaattccaatgtagaatgcttggggcttattcctttgttctgtttctttcagaatacattttaggaaagtaattattagctaaaatagatcaaattccaggaaattcctctgtggcatctaggacattctaatatatcagtctgaagaatgagagaagtaaaattcattgaatcatcaatcaaaaagctttatatcttctctaaaagaattaacttgttcaaaaatgagaacactgaaagtatgttttgaggaaattgctattaggccagcaaagcataagtatcttaattatttggtctagtcaatcaattatgtctcttgtgtttccgtgtacctatgacattcagggataaggatggtctttgctgtctgtatgtggcatagaggggaaaaaaacccttgaaacggattttagtcttcactttgttcctatcttgccttatgatcttagacaggtcatttaattttctgaatctcagttttctcttatataaaataggaccaatagtacctattccatcggaagcacattacagatgtaaggtacccttattcatgttacccagagattaaagatttaaaacagatttattatagcaaagcagaggacaatctttctgtttaactctctctctttttttttttttttgagacggagtctcactctgtcacccaggctggagtgcagtggcgtgatcccggctcactgcaacctctgcctccagggtcaagcaattctcctgcctcagcttcccaaatagctgggattacaagcgtgtgccaccatgcctggctaatttttgtatttttagtaaagacgaggtttcaccatgctggccaggctggtttcaaactcctgacttcgtgatccacctgcctcggcctcccaaagtactgggattacaggcgtgagccaccacgcccggccctgtttaactctctaagacacatctattgctcatgccaaaatctgtctttacattttatggcatctttatttttaatatctttttagataaataatgttatttaaaaaatgtaatattattaaaaatgctaaatattagaaagctaaaagcttttaggtaggaaatttttttttttttgagatggagcctcactttgtcacccaggctggagtgcaatggcgtgatctcggttcattgcaacctccgcctcccgggttcaagcgattctcctgcctcagcctcctgagtagctgggactacaggcacatgccaccatgcccagctagtatttgtgtttttagtagagacagggtttcaccatgttggccaggctggtctggaactcctgacctcaggtgatccgcctgcctccgcttcccaaagtgctgggattacaggtgtgagccaccgtgaccagccagaaaatttgtttttctatgttttccaaagttcattttgtttattacaacagacgtaagacatgcttgtttcagaaaatacatttataataatataaattagaaaaaactataatataatagtatccatagttttaccagccataatatgaacattttagggtacttcctgctagccttttttctatgcatgatggttactataataacgtcattttatataccactttttaacgtcattttgtatgccactttttaaacatttcctcagttttaataacttcttcataaagtttcttttaacataattaaaagtacatctacctagctttctcttagttcgtctatatctgtagtatttctacaccaagatcacacaaaaaagggttgtatttcctaatattctcttgcagagaatatattgcatgggtctgctcatgacctactgtagaattctgagaaactcacatcccgggacagagaacatgcctcattcgtgttggcggcaactctgcttttcattcactcttggctctactaccaagtgcatatttatctgttttaaatagctttctaacaacatatgtcaatagatgtcaggcacagatgagcctccataagtgtgtttttggactagcttgtagaatctgatttatagccatagattatctagatgaaatatgcagtaaaatagtatgtagtttggccttttagctttatagattaccctagtcctacaaataaacccaaacaaaaacaaagataattaatgccaccgagaagtattagtattgtgatttgcactgggcctcagactgctatgaggagttattaacaaataaatgttcagactgtcacaccttgggccctggaatcccggttctgtgtgtcatggcccataatttttctgaagcagaagaataacatatgcagatccctcgttttttgaaagcctacaaaactttatggcaagagcttcaatgagagacaaagtaaagatcagccctggatggaagcaaatgctaaggaagttttcttcgattttcacagtgggtccgccattaggtactcagacagagttaagaccggggtcactggagagcagatctggctacaaatcaacgagcccaccccgaatgacaaagggaagtatgtcatggagctctttgatggcaaaactggacatcagaagacagtggatctctctggacaaggtaaacagatattttgcagattcaaatttactctagatgaatgagccttttaaaaggaatgaagggagttgggcatggtggcttatgcctgtaatcccaacaccttgagaggccaaggcaggaggatgacttgaagtcaggagttcaagaccagcctgggcaacagagtaaaatctcatctctaaaaaaaaaaaaaaaaaaaaaagtagctgggtaaagtggcacacacctgtagtcccagttactgtgggaggcaggagaatcagttgagcccaggagttcaagaccagccagcctgtagcaacatagtgaaaccccatctctataaaaataaataaatattaaaaatgctcacttataagcaaaaagtcaaaaaaaatactggaccatttatccctttcccagaactatactcttcatcttattctttcttacaaaaataaaatagtctgccggcatggtggcctttaatcctagcactttgggaggccaaggtgggaggatcacttgaggccaggaatttaagaccagtctgggcaacatagtgaggccccagctcttcaaatataaaattttaagaaattagccaagtgtggtagcatatgcctataatccctactactcaggaggctgagctaggatgatcacttgggccctggaggttgaggctgctgtgagccaagatcacactactgcactccagcctgggcaacagagcaagattctgtctctaaaaaaataaaaaataaataaaataaaatagtctatactgtattaaagttaataaagacaactgtggactaacttttcctccacttcattttaaaatacaatctcaggtgggcatggtggctcatgcctgtaatcctagcgctttgggaggctgaggcgggtggatcacctgaggtcaggagttcgacaccagcctggccaacatggtgaaaccgcgtctctactaaaaatacaaaaattagctggctgtggtggcacatgcctgtaatcccagctacttgggaggctgaggcaggagaatcatttgaacccatgtggcggaggttgcagtgatttgagatcacgccactgtactccagcctgggctacagagcgagactctgtctcaaaaaaaaaaaaaaatacaacctcaatatgcagtaactcaggttttctcaacctcagagagcagattcatcacttagagcgtcgcccttcagccctgctgtgagtgtttttggtgctgaatccccttgtcttcacctcacccattcacggcgactagaaagactcgctgcaggacctttcagtaatgggagcagctgctccagagggacgcggactttctaggacacactttgcctgcatcacaagtgcacagtgacaggggattcattccacactccatctgacaatgtgaaacacaatggaaaaagggaggcagtcagtgggtggaaaatgtttaatttttttaaattttatttttactctctggttcaccaaagcttatttaactacaccactctgaaatcccttttaaggaaaaggctgtagattgtcctaccagcattgccactgccaccaagcacagattggctcggccattcccacctctctgtcagagtggtgcggggacaagaggaagcactaacctcagcctgggtccgcctaactggtctacccttcattttacagatgagaaaaaatcaggactagcaactgtaagcctagctttatacttatttttcccatctgtaacatgagggaataaactagtattatctaagcattctctagacttaaaatatgattcctagaccactgaggagattaaaaatgaggtgagagggatttcaaaatgaagcgacctgccagacatggtggctcacagctgtcatcccaacattttgagagactgaggcagggggatcgattgagcccaggagttcaagaccagcctggacaacatcgcaagaccctgtctctacaaaataaaaaaaatgtaaaaatagctaggtgtggtggcacacacctatagtcccagctactcgagaagcagaggtaagaggatcatgtgagcccaggagttcgaggctacctcaagctatgattgcactactgcactccagcctgggcaacggcaagaccctgtctcttgaaaaaaaaaaaaaaacaaggctgggagctgtggctcacgcctgtaatcccagcagtttgggaggccaaagcgggtggatcacgaggtcgggagatcgagaccatcctggccaatgtggtgaaaccccgtctctacaaaaaatacaaaaattagctggtcatggtggtgggtgcctgaagtcccagctactcaggaggctgaggcagaagaatcacttgaactggggaggtggaggttgcagtgagccgagatctcgccactgcactccagcctggtgacagaactccgtctcaaaaaaaaaaaaaaagctgccattttgcttgaatctttaatcaaagtggcttactcggcaggcacagaaaaaaattatttgagaactatatagatctcattttcttgtcccacttgcctttcatcccctctccatcatggcataagaaacattgcttcaggcaagcaccagcaccctctgtgattacagtaactcattgtgcttttttgcccaaacagaccagacagcataacagaaagagagttaactgcctatctaggaggctctgatgtctgggataatttaataagacaaagtttttgttttcctttttgtttgacactcaggatgtttactcaacaaccagcttttctttgaaacagacttttatggctgggcgcagtggctcatgcctgtaatcccagcactttgggaggccgagacgggcaaatcacttaaggtcaggagtttgagaccaccctgcccaaaatggtgaaaccccgtatctactaaaaacacaaaaattaactgggtgtgatggcgcatgctacttgagtggccccagctacttgagaggctgaggcaggagaatcgtttgtacctgggaggtggaggttgcagtgagccgagattgcaccactgcactccagcctgggcacagcaagactccgtctcaaaaaaagaaaagaaacagacttttattcccattttttctttgttggagttaatctttgcctttccgtttgaggggctgaagccctcttgctgagttgaaagcttctaaaatctactatttcatattttgtgcctacaatgtatttcctggccttgttaagtacattaagctgtggagtgaacacataagcacagtcttaatcaaagtcggtttagtcatgtctggaccgatcacagcaatctccagttgtgaattttaatcgcccctgtgtgtcatcaattctgggtgagaaaattctaacttttcttttttcttttaaagcatacgatgaggcctatgctgaattccagaggttgaagtaagtccctggtcctagcaaatgccacttgcatgcactaatttcccgggaagcttgcatgctgctcgcccctctgagtgttagaaagagccttttatttcagaaagtacagtagaagcagcacttcccattgttatattgaacagcaaaatgtctctgaggcaaggaaaatgtcgtcaagtttagctactttgaagtaacactaacacaaaattcttcgtctgtttgttcgtttctctcaaccacagacaagctgccattgccgagaaaagtaagtaaactttttttttacttttcacaagtactcctgggatagattcaaaagataattttattttgctattataactacagatggaggagaatggaagtggtttttttcttttttaaatcttaggtgttctacatatgttttcattttagtcttttgagtaagaatatctaggaaaagaaggtctcaggttacattgtaaagaatgtcaccctacccttgacttgagctacaacccagacatcctgagaaacctcttggctgcaaatcatacagtaggttgttagtgacttgcaggtacagtgtttcataaaaatatgtatatattggagaaaagaagcaacaagaaacattgtaagggccaggcatggtggctcacgcctgcaatcctagcactttgggaggccgaggtgggcggatcacctgaggtcaggagttcaagaccagtctggccaacatggcaaaaccccgtctctactaaaaaatacaaaaattagccgggtgtagtggcgggtgcctgtaatcccagctacttgggaggctgaggcaggagaatcacttgaacccgtgagccaagatcacgccactgcactccagcctgggcaacagagcaagactccgtctcaaaaacaaaacaaaacaacaacaacaaaagaaaatagaaaactgtaaatttgatatcaagtaattcactgtaacttggccccaacaaatactgtacattttcctgggagcccctgcgagataaaagctaccaaataaggccttccttactttcatataactagacacagtccaagcaaagcaacaccaatctgtcaagtctgcatgtgtacccagaaacacacacactgcagtatttctgtgagctgtttgtttcacacacacagatttttagaagaactcagtcttacaggatcttaggagtcactgactaatccataatactaattcagcttctttgtccgagtgggagccagaattttaaaattgttacaggctaaaatggtagagtccacctgagctggatgtgaaggggacagggagaaggagcaagaagggaagtcatccttccccacagggctccatgtgcctctgggtgcaactttgaactttgaacctgaaacttgcactgctcccctccactcccttctccactttccccctcctgctcaggccctgtgtatgtggactgcagctgggggtaagggacagaggctggtactggggcaccagaggtcaagggggaagtggggtgttgagcaagagagagctgttcttgtttggtactgagcaaagcctacatccacaagcagttttctgtctttccagattcttgaactcttctgtgggcaaggagttcatgaactctttagaactggaagcaaccttagagcttttctagctccatgtttgtaaacttttgtaagctatggaacacttacttcaaattgatgcaggatttttgctccttagttcagctaaatccaggttcttgtctcacaaccaggaaaaattagacatgcggacacattgaagggtgaggcaggcagaatttattaagcgaaaggaaaactctcggcaaagagagggtttctccaagcaggtttccctctcacagttgaataccaggtctaccgtggatgagctgaagaggccaggcccctcccctgcataaggtgcaaattcctggtggatccccccattcccccaatgcacatgtgggcatgcccaggcaagccataggtagcatcggaaaaggcaacattcgattggttaaaaggcattattcagaaataatcatagtatccccaggtctaatgcaacccttgtcccccattctacaaattaggagactgaggccaacacagtgaagtgactggcccagtatcacacagcatgtcacacaggaaaccagaagaagggttaggcttacaggtggcatgatggaattagcagtagaatgctgtcatgtttcaccaaaagcaaagctttagcctcacttaatggagaagggaattgtagacagggaagtcaagagtcacacattaattgaagcaggccgaaaaatgagagggaggtggctgctgtgttcatgccagagagaacacctttgaatgaatgacaggaaggtgccctttccagggactgaggcagtcatgcccagggcatatagcttggctgagggcacccaggatcccagcacccatcctgtgcctcgtcccctcacctgcaggcctttatactcctagccatagacagtggcctgcacagcactaccaagaactaccgggagacaagaaagggacactctctagagaaggcttcaaggaaagcttatggccaggcctggtggcttgtgcctgtaatcctaacactttgggaagccaaggcaggatgatggctggagcccaggagttcaagaccagcctgggtaacataagaccctgtctcttaaaaaaaaaaaaaaaaaaaaaaaatgcttacatctgcatgagcctccaatctccctagcatgtagcccttccattatgcaaccttttctcatcatatggaaacccataaaagaggccaagctacgcttggaggctgtccatagagatctgttctacttccttgagcttagccctactaagctgcagaagggtcagggccaaaaacagccatgaaaatgatagagcgggtcttgatatggcaaagctatcacacactggtattttagatacagatacaggcactcccccaccgccccccacacacacacaatatgacggtgaagaaggattaaaatcctgaatccagccaggcatggtggctcacacctgtaatcccagcaatttgggaggcagaggcgggcagatcacttgaggtccggagctcaagaccaacctggccaacatggtgaaatcctgtctctactaagaatacaaaaattagccaggcgtggtggtacaggcctgtaattccagatactcaggaggctgaggcaggagaatcacttgaacctgggaggcggaggtcgcagtgagctgagattgcgccactgcattccaccctgggtgacagagcgagactctgcctcaaaaaaaaaaaaaaaaaaaaagccgggtgcggtggctcacgcctgctgtaatcccagcattttcagaggctgaagtggatggatcacgaggtcaggagttcaagaccagcctggccaagatggcaaaaccccatctctactaaaaatacaaaaattagctgggcacggtggcaggtgcctataatcccagctactcgggaggctgaggcaggagaaccgcttgaacctagtgggcagaggttgcagtgagccgagatcccgccattgcactccagcctgggtgacagagtgagactctgtctcaaaaaaaaaaaaaatcctgaatccctggatcattttctttttttgcatgttgaaaactgtataaaagaactatcaggagaaggaaactaaattggaaatgtagcttcctgggtggttttgtgagtatgaccgctggccttgccactgcagtgattaacccaaaatgcctatgcttgcagatcgtgcccgggtgttgggaggtctcccagacgtggtcaccatccaggaggggaaggtaagcatgaagcctgcctgtgcctgctccttctgcactatgaacaggttccagcaccccagattttgttccttcttttaaggcacacttaacagcccaccaccttcatcgtactccatagctgcttatacttgaccagagtaaccaaacacaaggttaaaaatcagtcagttttctggccaggcacgatggctcacgcctgtaatcccaacactgggaggctgaggcgggcggatcacctgaggtcagcagttcaagaccagcctggccaacatggtgaaaccccgtctctattaaaaatacaaaaattagctgggtgtggtggctggtgcctgtaatcccagctatttggtaggctgaggcaggagagttgcttgaacctgggaggtggaggttacagtgagccaagatcatgccactgcactccagcccaggcaacagagtgagactccatctcaaaaaaaatcagtcggttttccaatcatcttaacgtttcataggtcaagcatcggcataaaagtttgtctctaatagacatatgtagaccacttagtatctttgaagagtcaccctttaaaattatgagaaaatgaacatgttctgtgttaactctatgacaaataaaattgaagaaagaaattacctccaacagagtggaatatgaaaatttctataggctctagttctgttgaaaacaggcttctttctttctttttttaataatttttttcccctgtgacagaactccaggggctcctgagagcatgtgcccctaggccgggcacagtggctcacgcctgtaatctcaacactttgggaggccaaggcacgcagatcacttgagcccaggagtttgagaccagcctgggcaacacgacgaaaccccatctctacaaaaaatacaaaatttagccaaatgtagtggtgcacacctgtagtcccagctactcgggagtctgagtgggaggaccgcttgagcccaggaggcggagtttgcagtgagccaagatcactccagcccgggcgacagacaccctgtcatacaaacacacacacgtgcacacacacacacacacacacacacacacacacacacaaagaacatgcacctctggtttctttccatttggttttaaactgatgtaacctgtttctgtaataatctctccaagagattacaacgttgtaaatttggcatcaggtaaatcactgaaacttgtccccaacaagtactgtgcattttccgaagagcccctgtaagataagatgccaaataaggccttccttactttcatttaactagatacagtctgagcgaaccaacataatttctaatctggattcgctttttttatctttatgtttcattaaaaagtttacagccactgggtgcagtggctcatgcctgtaaaccagcactttgggaggccaaggcaggaggattgcttacacccaggagttcaaactagcctgggcaacataatgagaccccgactctacaaaaacaatttttaaaagtcagctgggtatggtggtgcacacctgtagtcttagctactctggaggctgagatgggaggatcgcctgagcccaggaggtcaaagctgcagtgagtcatgacaccataccacttcacttcagcctggacaacacagtgagacactgtctacaaaaaataaatggaaaataaattaaaacaagtttaacataccagtcctaggggtagagatatttgtagtggaacaaattttccacttcaaagggcagtgaagacatacagtgggtgactggaattcgggtaacaaagcaaggcatgtggaaatgctttagcaagaggtaggtttcattcaactgcatttcctcatggttggaaaatatgatcacggttgattttaagctcagccactgcaggggttcttttgttcctcaactgtcttttccattttcctcacctaataaggttaaaaatatacaactctctaggtcgtactgagaattaagaaagagaatgtatatgaaagtactttgtaatgcagaacccaaatctgaagtgtggataagagttttccatgatgcctaaggtgtttgggagttttgttttttctttttcacatttttttttcctaaccactagactgtcagggggtgtttgggactttgtttcattttgttaaaagttttaactacaagtaatcacagtttccaaaagcatatacctaatctgctcattaagtttaaggataataattggactcctctttttttgactgaaatgtatttgtaggataattcagtaagaaatattaattagtgatgggagaaaaacagatttcttaatctatccaattttaaatgatatacctgcaaaaggggtaacaaataatcatgtaagaccctttagaaagctatgtagatgggtgttctttctctgtacattgtgagccctagttctttccttatcacatctggattttagtaagagaaaaatacaagaatggaattttaaaatgtgaagtaaattcaacatcattaaccaccaggcaagtgaacattaaaaccacaatgaaatatcacaccacacctatcagaattgctgtaataaagaatagtagctgggtgggctggtgtacaacaacaaatggtggggaggctgtggagaaaccgaatcacttgtatattctggtgggaatgtaagccaaaattgtatagccgctcagaaaaaccgtttggcaatttctgggaaaaaaaaagaaaacatgggctgggtgtggtggcccatgcctgtaatctcagcactttgggaggccacgatgggaagattgcttgagaccaggagttcaagaccagcctggtcaacataatgagaccccatctctattctctatttttttaattaaaaaaaataaagaaaaaatgaaacatgcatttatcatacattccagcaattgtatccctgggcatttatcccagagaaatgacagcttatgctcacataaaaacctgtacacaaatgttcatagcaacttagtgcatcatagttaaaactggaaaaagctcagatgacccttacgggcataaacatagtatgacattctagtcagcaagaacaagggataaactatcgatacatgcagcatcttggatgaatctggatgtaattatgctgagttacaaaggttattctgaaaggttatacagtgcatgattctatttatataatatctttgacctgacaaaattttagaaatggaaaacagatgagtggttgccagagattaggaacagagtttggaagttggaggagaggtgggtgtgggtataaaaggacaacgcaaggggttcttgtggtgatgaaaatattctgtaaattgaatagaatgaaacacacacaaacacaaataagcaccagtaaaattagagaaatctaaataaggtcggtggattgcatcaatgtcaatatactggttatgacattctactatagttttgtaaaatgttaccactgggaagctgggtagacagcataccagatctctttattatttcttatggatttctttattatttcttacaactgcatgtgaatttacaattatctaaatccttttcaattaaaaaaagtaaggtaaaataaaactgtagaccttgtgtctacatacatatctagaatatcgatcttttagaataaggtttcagcacagatgggaatattttctttaggaatacgttttggtaggggaccactgcaactgcagcagattggatgggctttgaggagagaagtaaaataagggtggtggaatttgaaaatcagtaacattatctgaagcagctgccgtgattctgctgcccggctctttgatgcaaatgaaaggcaaaagtgagcaggtggcaattacagcaatgagattcctgtaccgagacagaacccaaaatgccacaatagagcaaaaggcatctatatgtttatgaaagagaaagtgaaaatggggaatagacataaactctttcgtgtgtttttgataataagcattccagaagccagaaagcatataaaggccttgaggagcattaaaaggccttgaggagatcccctcacatgttatttcaaactgtaactcacacaggtgcatacacagaactactttaaaccctggtccgggaggcttttacttatcctccctttggtcatgccaagccaccagccggcaagattgttgacagtgtgtctattacatctaatttatcttcttctctcccataaaacctgtcttgcaggcccttaatctcacttgcaacgtgtggggagacccgcctccggaggtgtcgtggttgaagaacgagaaggccctggcctcagacgaccactgcaacctcaagttcgaggctgggaggaccgcgtacttcaccatcaacggcgtgagcaccgctgactcgggcaaatacgggctggttgtgaagaacaagtatggctcggagaccagcgacttcaccgtcagcgtgttcatcccagaggaggaggcgaggatggccgccttggagtccctgaaaggtggcaagaaggccaagtgaccggaggtgcgaggagagccagccggcctgtgtgacttgggtgtgaatggtttgggttaaggatgagacgtcttcatgctttctcctccctattattttctggcttgaggggaaaataatgtcaggtctttcactcatataaaaaagcaccaactaatgacactttaattgtttttctttatctacaaaattatgtgttaagaaaataccattcatagcatgaagattaggaaacagttttaaggagaagacttgaatgaagttggagggacattgaatgatggtcagagggcagacgaatgtgtcgtggggcgaattgggatttgctgcagctgtgaagccatggccgtgtctcgtgtgttgttacagaggtgatgtgcttttcgacgggcgcctcgtggcttggaacctcctctgtatgaataaacagttttcacgtctgtcctcttccccgacactgtttctcaaattcctgctgttttgctgctaggttgggtggcttcttggtgcttctttctcaacgcgtcttgtgccacatcttctgatttaaattccttttggtgaaagcagtaccttgcaacatgatcagataagtcgtttgagctcaacgaggttcaggggtgtgaaattacacggccactgcacatctggtggcttaccacacaatcaagccaattccattaataagatacacaaggcaattgaatgtaatgtgacaattacatgtgataagatggtgtgaggcgcctcctgccagaactggagactaagggcccacagctaagaataaaaggtacataagaagcctcattctgagctcagagaactgccagctgtggaaattgccactccctgaggggtttgctgagggtcagcatcccagcagcagctgttgtagaaagttttgtcctccccaaccccagcaccacacacacacacacacacacacacacacacacacacacacataacacacaccattctaggaaaatcgtcatggtgtttttttctgttgggtgcagtatctcacacctgtaatcccagcactttggaaggctgaggcgggaggattgcttgagtctaggagttcaagaccagcctgggcaacacagcgagacccctctctacaacaaattttaaaaatcagctgggtgtggtggtgcccacctatagtcacagctacttgggaagctgaggtgggaggatcatttgagcctgggaggtcaagcctgcaatgagccatgatggcgccactgcactccagcctgggcaacagaacaagaccatctcataaaaacaattttttccccttctttctcctgccaaaggtagcggatgagacaagaaatttccttatacagttggcaggggctcctacacaccctctcctttacaagtttaaggctggaaattgcttctcatctgactgtggccaatccacttgtccaaacaagtgctggatgctgctgctatgacactgaacaccaggcaggagccagatgctgtgttctcactcccagatatggcaaggagatgagcttcccaagggtcaagcggaccccatggaaggtggctggccatgagcagtctgcggttctgcctgcctcagtaagagggctacatctgaacaagctgacccggaaggaaactgccagtgggtggacacctgctggggagctaaagatgggagggtggcggggtgggggtgggggtgggaaaggttcaagcggcggcagacctcccatgccaagggccaagggctgtgcaagcgagaggcccctaagactctccgaaaagcccccaccacacccctcaaaaagccagcaacagagctcccagtgtcagagaggtgaggtttctgcaagcagcacctcccaccccttccctaatttccacctgctggatcccagactggggagaaagcaagacgggtgttgaatcaggtggaaacaaaattttaaaacagtgtattccaaattctgaaattgtgcaaaaatgtatgaaatcaaagtgtgccctaagacccctgcgcccagcagaggggtttgctgggacacagcagcagtgagttggggagatggcttttgtgttcggagctccatacgctgagattgctcaacaaaacagctataagaattatttcagccattattatgaccaaactaaaccagtgacctcaagatttaatagcttaggtaaaaagctgctatttctacaggggaaaatagaactgaaactatagatccatcactttaatggtgccgaagatactttgtaacacataaaaatttatgaatctgtgacctggtaaatgtgaagtagtggtacttaaaggatcaacttggaacacagaaaagaccattcagagtttacttcagttttataaaattaatatataggctggggtgcagtggctcacgcctgtaatcccagcacttcgggaggccgaggcgggcggatcacctgaggtcgggagtttgagaccagcctggccagcatggagaaactccatctctactaaaaatacaaaactagccgggcgtggtggcacatgcctgtaatcccagctactcaggaggctgaggcaggagaattgcttgaacccaggaggcggaggttgtggcgagccgagatctcaccattgcactccagcctgggcaacaagagcgaaactccatcacaaaaaaattaaaaaaataaaaaaattaatatatatatatatatataatagtcaagtgacacattttaaaacctagatcttcctaaattcttgaagttcaactttaaaacattatttttccatttaaaaatctgactattgaagaacattaagtttaaggctgctttttatagcataacttaattccctttaatttgttaagctttatttataaattaatatattttctctccactttaaggactactattgtctgacttaaacaaaactgtctcaagaacttaaataactttatctactaaactaagtatataaatacagaaaatttggagttttcataaatattctcatattgtatataaacctagtaagatgaacataaaatcacagtcaattaaacattttacattggaatcacaaagctggaggctgggtgcagtggcttacacctgtaatcccagcactttgggaagcccaggcaggaggatcactcgagcccaggagtttgagactagcctggagaacatggtgaaagcccatctctacaaaaaatccaaaattagctgggggtggtggcacgagcctgtagttccagctactcgggaggctgaagcaggaggatcgcttgagcctgggaggtcaaggctgcagtgagctgtgattgcaccactgcactccagcctggaagacagagtgatactctgtcaaaaaaaaaaaaaaaaaattggacttagtcactaggctaagacatttcaagtacatgaaaatcaaatatgcacagcctacataatgcagaaatactaatttttgcctagatatagcctctaagatctgggactggagttttaatacacatgccagaatgagagatgtagacctggattgttcaaggtagtgagttggtacccaagatgcctgcacaaatctgagatgcacaaagagtggcttagtcaaaacaaaaatgggaatagtaaaaatatcaccaactgacatagagaagctatacagaagctttccatctgcctgggggcggttctggatggaagaaaatttaatggattcctcaaactagtactgcatgtttgtggggtgcaaatttacagcaccacatggtaacaatctcaagccaagaattcccataaaaatggtcgaggtccggggcctcagggaagcaaatgcaaaactacgctagacgggattctctgtctgcccacaaaggattactgttatggaaattgtcctcccaccatgaacaactagaaaaacaggcaaaatatcaaaacatatggaaaaataaccgtttagggcattggccagcagatgtgcaggcccaagatgcctgagagaaggggaaagtgatgagacacctgtgattgctccagcttcttcttgcctagacagagtgctcaggctgcagcccagcagggggagcctgtcagtctcattgaattgaggggacagagactgaggttcaatgaggcggggtcgtctaaaatgtatgagaaagaataagagagagaggagagttgcacgaagacagggtgctggaggctgcacatgctctttggctgagtactattcagcaaatgcacgggagaaagaaatctggaaagcctcaggccaagcaattcttggagctcacgcgggctggaaacagagtccgtgtccaccagccggaatgaaaagactttgtaatacgtgggcctcgggtagagtcctcagaagtttctcctccatagtggggcactactaaggtgagaaattaatcctggattaaaaactcctctggccccaccctaacagagcttaaaagcaagcctcaagaggatcaaatatctacaacaaatcgagtgtcagaacaaggtgcagcgcattttaaatgaacacactggcacggtctcaggtgttcattagttctgttctgtgggcctgcttcacatacccacagcaagatgtttagataaaatactaatacatcagttatatggaggattacaaactggatacatagtgaccatcacatcacagcctcaaatatttgcattttgacctctaccttgggctttagagataagattatgtttaaaaaacagtcttaagttatttaaattgcttctgaagaatcaactgatatatgtaaatgaaaatctcaatctctaaaatgcacaccaaagtttccaaaattacttagctcatacttactaacatctaagtgcattttttactttttttagaacatgctttaattgtagcccagcatcaagaaggcatagtagacttgtcacaaagctcagacacacacactgtggttactcagacagtccatactccctgctactcacttttgaggatgaatatttacattccaaatgatacacaactaagtttaatttaaaacactttggaaacaaaataggcactgtttgcaataaattatgaaggtaatgctcgcctcccctggggttgagtttctacagtttccttctgtggtttctttcctctcgtttctggttttagaaggttaagggcataacctatcaggccgggacttcagcctgaggcgttactagtgcccatggtatcacacaaaagccacccactctgcttgctaagagctggttctaagccgggagaaaaggtgttacattgctgagccaaactgaagccaagtgtttcctttcagagacgagggggacgtgtcccagaatcagagagtgttttattacattgactctattttggttgttccagggctcatcttagttatctaaatgtccctactgaatgcacccatagttgcccacaggaagcctctccaaggagacccccatgccaactgcagtacatatgtgaatgctccctccatttccttgttctttacagcttaatattcccggctagaaagagctaaccagttctcggaaccctctttgctcacaggcttctgtcagtacaggcacctctggttcataagcttcccacgcagtccggagacattctccagaatttcacgagaagcgtgtgtcttccttacacactcaaaaccaggagctgaattgcaaggaggcatttggcttcatgaaagtgaagactgtgcagagaaagaagagaagcaactcgttgcgggggcagaatcgagaaatctgaaatcctcctctcaggtgaaagtttcagcagcactgaagtacagatgaaaaaataatgaaaatgaaaccaattccttgttttcatctcaaaacagaaagaaaaaacaattacctctacgtcattctattaaaaacacggggcattgcctgggcacggtggctcacacctataatcccagcacttcaggaggccaggaatttgagaccagcctgggcaacacagagagtccccgtctctaccaaaaacaaaaaataaaaataaattagctgagcatggtggcacatgactgtagtcctagctacttgggaggctgagatgggtggatgcttgagcccaggagctcgaggctgcagagagccatgatcgtgccaccactctccaggcagggcaacagcaagactctgtctccaaaaaagacaaaccataagataccatttcttccattcattcattcattcaacaaatatttacttggtgtgggtcaggccctgttcccccaggcccttctgacctgccatggtagaaagccctctgtccctaaaattcctgcctttttgccaggtttatgtccagcacaagtggaaaatcaccaacagctttgacctctgaacagacactgccggaagtcatggaagtgaactggggtgaagaattggttttttccatctcactcaagtgtggcaggacagttgctctgtagcaccggcggccaggaagtgagggggaagaggcaggaaatgtgtattggcttctacacataaacttcgtatctataaagaatgagactattttgtttaaacgtttttagttggaatgtttctcaattttgtatttcttgaggctcttaattttgtttcttatctgggctgcattatggtggttaacatttcaaaaagtggttgagcatttctaacgctgtgtaaaaaaagattgttgcctttaaatacaaggcagcaaagaaaaagaaaagctgtaagtaaaaatataggccaggcaccgtggctcacgcctataatcccagcactttgggaagccgaggtgggtggatcacctgaggtcaggagtttgagaccagcctggctaacatggggaaactttatctctactaaaaatacaaaaatcgtctgggcgtggtggtgcacgcctgtaatcccagctacttgggaggctgaggcaggagaatcatctgaatccaggaggtagaggttgcagtgagctgagattgcgccactgcactccagcctgggcaacagagcgagattccttctcaaagaaaacataaaaatataaaaacataatgataatgagaagccattttagctagagtaatagaaaaaattcatttgcattttaaaatatggtcatgctaaaatcactttagcttttaaatagacactttgatgtccctggttctactagaacctgtcagtgacatttgaacaacttttatgaagtagaagcagattgatctcctgcatagctaaggttcagagacaatttgtctcattttcactctattttgataatacaaaactaaaataatgaggaaatgtatcaccataaggcagaggttattaagtgttcagacctttgttgataaataatttaaagcaaaataagtccaaagactaggggaagttaaaaaaaaaaaaacccacatgtcacttcaaatgtttattatagtggtatgctgtagagttattgttgtaaagtattgttactgtgttatttgtgtattatatagagatatatagagatacagttgtttattattgttatagtaatattatcttgttttatggttgtatattatagagctacaaacataataaaaattagaaaacttgaaagaaattgtataaaggccttaattcagtgagacgattggaactgctctcatttctgtggtagccacagtaacagaaattcagcgtgtcctttgtcaacacaggaagtttgttacaaagacatcattcaaaacaagagtcaaattctgggaactccctttaaaatgaaaagggaaaaaaaatcagaaagaatttacttttatagcctttaaagtactttttgtagagattaggctagtcactgcaaaataaataaataaataaattctaattcaattcacttcttctatggaccgcttgcatgagtccttgaaaattacacacccttagagcatgatattttcttttgccggaggtattcattggcctgtataaaggtatgcattagttacgtgcctcctctgccccacaaggcaggcttttgaagcattaacatttttgttgtttttctcttttgtggggtgggggtgttgttgttgttgttttgagacaaggtctccctgtgtcacccaggctggagtgcagtggctcactgcagccttgaactcctgggctcaattgatcctcccaactcagcctcccaagtagctggaactacaggtgcaggccaccacacctgtctaatttttgtattttttgtagagatagggttttgctgtgttgcccagactaatctcgaactcctgggctcaggtgattcacctgccttggccttgaaagtgctgagattacaggtgtgcctggccttgaagcatttactctggggagctgaaaaaattctgctaagcacattatgtcttaaaattagtcaagtattgatcatggatttggggaacttctcgatacttgactttaggtgtaaaatatatgccagttttgttgctattgttatcattcacttattccttcaacaaatgtttactgagcaatgtctgtgagaaaacaaagatgaatcagatggagattcgccctcaggatgtttactgctaactgatgtgttagcagtaccagaatgtgaacaaccacagtataagcaacgtgttcatagggaagagacagacagcatgctatcctctgagttcaaggagagtgcgatgcttgctgtgcagtgaggttagggtacaggggaaggtggattacaggaatcagaaaaggttttgtggacacagaagcatttactctgtgttttgatgagcaggagggttttagccagtttcaagactgaagggaagagtatttatgttaaagaaatccctcggctggctgggcgcagtggctcacacctgttaatcccagcactttgggaggccaaggtaggcagatcacttgaggtcaggagttccagaccagcctggccaacatggtgaaaccacatctctactaaaaatacaaaaattagccaggcgtggtgcacacaactgtagtcccagttatttgagagactgaggcaggagactcgcttgaacctgggaggcagaggttgcagtgagccgagatcgcaccactgcactccagcctgggagataagagcaaaactccatctccaaaaaaaaaaaaaaatccctcggtaccacgaaggcatccccagagcagacaggtatacacaggtgtgagcttcaatatctactcccagacaaaaaaggcattggccaaactcattctgtctttattacaggctgaattgtgtccttcaaaattcatatgttgaagccccaacccccagtaccttaatatgtgactgtatttggaggttatgtctttaaagaggtaattgagttacaatgaggtcactgtagtgagctctaacccaaaatgactgctgtccttgtgagaagtttaggacacagactcaaagggaagaccacgtggagaagcagggaaaatgtggccatgtgcaagccgaggagggaggccctgggagaagccaaccccacaaacatcttgatctcagacggtaatacatgtctgttgcttaagccacatagtctgtgatccttcgttatgtggcagcaccagcaaactaacacagtccccatggaggcttcagacattctcctggtttgaacttggtttggtttccgggccccccaccttgctccagcttacaactcagcccagcaaggctggtggactgctgtgatgggccatctcaccagcaggtcctgacccacaaggtgtgcaggtagcagaaaccaaatacaacaaataaggcaacaagaaacacctctccaacacctactagtcctagagccttgtgattggcactgggtcattgatgtttacgctgcctctattcataagtacttataatgtgccagctcctgtcctaagccgtttactcactgaatcctttctataagcatgtaggggagatactattattgggctgcttttccacatgaggaatctaaggaaccaagagggttccttttgtccaagaccacacagctagtaagtggtctgggatttgagcctcggcatttcggctccagacttcattttcttaacagttagttatacccagctgcctctggatagaaatattttcacagtctttaagatatgccaggagcatacttcgcagggtcacatgtaagggaggggtgacctctgggtattactgcaggttgagctacctccgtcataggacctccacaaacccacacgctccaaacacacaaccatgcaagatcaaatataacaggactgtctttagtacatttagagcatggaaggagaaagagaaacctcttgaatgcacaattgttcagggaaaagacattatttacttcactgctgatggtctagggcttagaatcatgcctggcacattagtaagcatttgataaatatctattgaatgaaaaaaattgggggtagaaatgaacaaaatagtgcgcaagtagtgtgcaagtgtaaaagtgaatggataaagagggtgttggaactcaaacttcaggagtgtggagctggggtcttgttcatacatcaaatgatcatagatcaaatacatagtgttcactcatgtcaaaagatgaagctggccgggcgcggtggctcaagtctgtaattccagcactttggggagccaaggcaggcggatcacaaggtcaggagatcaagaccatcctggctaacacggtggaatcctgtctctatttaaaaaaaaacaacaacaaaaaaaaaattagccgggtgtggtacctggcacctgtagtcccagctgctcaggaggctgaggcaggaaaatggcgtgaacccaggaggcggagcttgcagtgagccgagacagcaccactgcaccccagcctgggcgacagagtgagactccatctcaaaaaaaaaaaagaaaaaaagaaaaaaaagatgaagccacaaacctgtgtgaggagagttccctgtataaagccaaggaattgtcctatctgtgaaactgagaccagaacattctaactggacaagcagtcctgagaagcctcagccagctgaccagctcctcctgtaacttcttgtaactatacaacccgaggaatgtggctcctgagagaaaattggtggaaaatacctactacagatgagctcataggtaaaaatttaaaaccatctgggaaaggaagtagcacaaggaagaatcacaaaagagatcattcccatccaagaactagagttaatgaatgggaatgatccgttaactcatggactcctccggagtccccaaagtccattatgtcattcttatgcctttgcgtcctcatagcttagctcccaaaaataatcgtgtttaaaatattgaaggaaaaaatataacctatagggcgggaacagtatattattaggggaaaaaagctaaatgactggaaaataacgtatagaaatcctacactgaaaaatatatgaattaattttttttaatttaatggatggtacgggagcaatctgcccttcattcttgcccactcttcacaaagttggacttcaatgggccagaagagtgccactttggcaggggtatcagaggtctaccctgtcaaccgtgggaggtggatagattaggggatggtggctagattatcattttattacagtgtcaggaactatctcaaaaggagcatttaaaacagctggctatgaaatgatgtcaacatactatttgtaactctattgctgttcctctcaactttaatcctgcttcagttttggatagatgcccaagaatatgcttttatttatttatttattgagacagggtttttattccctgacttcgagaaaaaataaaaataagtcagggtttttctctgtcacccaggctggagtgcagtggtgtaatcatagctcactgcagcctcaaactcctgggcttgagaaatcctcctgccttagcctccagagtagctgggactacaagcatgcacctccatgtccaggtaatattttcttttcttatttttgtaaagacagggtctcgctatgttccccaagctggtcttgcactcctggcctcaagcaatcctcccaccttgccttctcaaagtgctgagattataggtgtgagccagcatacctgagccaaacatattctttactggaaaataattaaatcatgagtcaaccaacaaacagtcttcattgcacagcatcacttatttcttcaaaaaatatttattggctgggcgaggtggctcacacttgtaatcctagcactttgggaggctggagatgggtggatcacctgagttcaggagttcaagaccagcctggacaacatgatgaaacctcgtctctactaaaaatacaaaaaaaaaaaaaaattagccagacgtggtggcatgtgcctatagtcccagctacttgggaagctgaggcaggagaatcacttgaatccaggaggcagaggttgcaatgagccaagatcgtgccactgcactccagcctgggtgacagagggaaaccttgtctcaaaaaaaaaattttctttgagtgcctactgagagtaggatactgtgttgaatatgttagagtgaagagctgtgaagacgtgacccgacaatgagtggtagagacgatgaatggtatagatgatgaatggtacagatgatgaatggtaggcttgaactggtttacataggatgatccaggcagagggcacagcaagtgcaaaggcccaggggcatatctgcccttcacatgtttgaataacagcaagttggtcagtatgcctggaatgtaggcacaaggtcagaaagggaagcaggggtcagatcttgtggggccacgtagagtgaggtaaggaatttcgactttattctaaatccagtgggaatccactggagggttttaagcgaggaacatgggttcaataacttttttaaaagatcactctgggccgggcgtggtggctcatgcctgtaatcccagcattttgggaggctgaggcgggtggatcacgaggtcaggagatcgagaccatcctggctaacaaggtgaaaccccgtctctactaaaaatacaaaaaattagccgggcgcggtggcgggcgcctgtagtcccagctactcgggaggctgaggccggagaatggtttgaacccgggaggcagagcttgcagtgagccgagatcgcgccactgcactccagcctgggagacagtgagattctgtctcaaaaaaaaaaaaaaaagaaaggatcactctgggtgcttagttggagaatggattgaagaaggacaaaaatgaaaggggaaacggtcaagttgctcttccactgttcagaataaaattgaggacagcttagactaaagctagcagtagagatgcagagaggctgacagattcgaggtataacttcagggtaaagttctgttgatgccctggatatagggaatgaggaagagaaggaagagccacagataacctggagacttttagcctatcggctggaaggggctgggcaccactacttgagatatgaaaaaatgcggagaaagagttttggaggaaaatcaagcctcccatattgggcatgttaattttgagacacctgttagacctacaaatggatatgacaaggaagaagctggataagtaagtctgtgattcaggggagagatcatgggagagatggagatttaagagtcactggactacagatgctcctgaaatccatgggtttccaagacaggaccacttctggaaagagggaaggaaggaaaagagagccctggtgcacgccaacatttagagttctagaagaggacaggaaccagcaaagacaactaagaagaagaaacttgggaggcagaagaaggaccagggagtgtcagggaggtgaaagagaagagcatgtgtcccccagatagaatggtcagctgtgtccagtaaggatgaagttgtcatagagtttagtttttgtgacagaagccttggagtgaatttgaaagaaaatggaggttgaaaaaaatgggacacaaggctgggcgtcgtggctcacgcctgtaatctcagcactttgggaggccgaggcaagtgggtcgcctgaggtcagaagttcacaacctagtctggccaacatggccaaaccccgtctctactaaaaatacaaaaattagccggctgtggtggtgagcgcctgtaaccccagctacttgggaggctgaggcaggagaatcacttgaacccgggacacagaggtttcagtgagccaaggtcgcaccattgcactccagcctgggcaacaagagcaaaactccatctcaaaaaaaaaaaaaagaaaaaaaagaaagaaaggaaaaatgggacacagagcacagataatgatttccagtagtttttttttgactggggagtaaagaaatgagatggtagctgaagggaactcagtgtagggtgggggactttaggatgacaggtgatagattagaagatgctgatgagactgactgaggaagagggaggaggggacaatgcagacagatctcaggagacaagaaagggtgacattcagaggacaggtggggttcatctgtgcttgggtgaggacacttaccctctaccttcataggacaggaggcaagaacatgagcacagatacaggtggttaatggtgagatgatgaggacgttcctttctgtttccatattcttaaggaattatgaggccacgtcatcagttgagagtgaataattaagaggaagatggaaaatgaggtaagtggagagaggaaaaggcatgatataaatatcttagagagcagggggatgtgagaggtttccaggaagtgccagagtccatttgaaatctatgtttcacattagtggcaccattgtgcaattatctgcaacattcatttgcacaagtgtggttatgctgaaggacggggctgtgtcaggtaggtaaacaaatggagagagaacaaaggaacaaagtcggggtggttttttttttttttttgatacagagtcttgccctgtcacccaggctggagtgcagtggcaggatcttggctcattgcaacctccacctccggggttcaagcaattcttgtgcctcaacctcccaagtagctggactacaggcacacgtcaccaaaaccagctaatctttgtatttttttagaagacatggggtttcgcctgttggccaggctggtcttaaactcctgatctcaagtgatctgcccacctcggcctcccgaagtgctgggattataggtatgagtcactgtgtctggccaagggtggttctcaaggaagtgattatagtgttggaccttggagtctaaggctgggtaagaagaatcagaagaacatttgataaatgatgctcaataaactggtagtcccgatgagagaggaatatttggaatttaagcttttgggtaagcaggccagaggatattatggtcagacagtggaatgcttaagtttgagatttcaaagactattttccccactaacctctctttattagtaggcagagtagttaataatccatgaaatgagattccagaaatagaaaaaaaaggtgcattgtcctcacctcacccaaaatatatatccccttatttcctctcagtgggctgaaattgcataataagaaagccattcgcccttcatcaagttacttcctatgacttatgccaacagggcactgcatctactccttctgctagcgagtatgaataaagcccctctcggcccaaagtctcatgcgatcaagtcacccatgcacagcactgggcaggaccgatgctgctcccaacttcacgcagtgagcatcttccctgcttcacgtttctgtgagaattaatttatcagattacttccagagaatgagtttttatgtgataaagagaagagaaggcacctgtaatcccagcacctggggaggtcaagtcgggaggactgcttgaccccaggagttcaagagaccagcactgacaacaaaacaagaccttatctctacaaaaaattttaaaattagctgggcatgttggcatgcacctgtggccccagctaccctggaggctgaggcaggaggatcacttgagccccggatttttttttttttttgacagaaacagatcttatagctttataagattcttcatttgccagtttgcagataatctctccctgtttagactaccagttccttgattacttatttcattgccctaaacagttgtttagctaggtaaccctaaattgcaaacattactcttaggtgaaaattgatacccccagaggcatagaacgtatatctatataccattatttgctgaaacaaaaagaatcagtcaagataagattgccaggaaaagtatctttaaacataggtaaggtttgttacgtaaactttaagccagtgtctttcccattgtaaagatttctagctgctttggtatagggggatgtccttacaaatggagatttcctttatagaagtaaatttattttacatagagtttcaaagtagcccgctaagtgctagaaagttgtattttggagactaatcttgttagatacttagttcgtttcttgattacattactgacttcaaagtggagccctttcatgaatgggaccaggaaagtatttgcagtttccagggcctaatacatatatattttaaaaatttctttctttctctctctttttttaaatttttttagtatttattgatcattcttgggtgtttctcggagagggggatttggcagggtcatgggacaatagtggagggaaggtcagcagataaacatgtgaacaaaggtctctggttttcctaggcagaggaccctgcggccttccgcagtgtttgtgtccctgggtacttgagattagggagtggtgatgactcttaaccagcatgctgccttcaagcatctgtttaacaaagcacatcttgcaccgcccttaatccatttaaccctgagtggacacagcacatgtttcagagagcagggggttgggggtaaggctatagattaacagcatcccaaggcagaagaatttttcttagtacagaacaaaatggagtctcctatgtctacttctttctacacagacacagtaacaatctgatctctctttcttttccccacatttcccccttttctattcgacaaaaccaccatcgtcatcatggcccgttctcaatgagctgttgggtacacctcccagacggggtggtggccgggcagaggggctcctcacttcccagacggggtggccaggcagaggcgccccccacctcccggacagggtggctggccgggcaggggatgccccccacctccaggagagccccggattttgaggttatagtgagctatgatcgcatcactgcactccatcctgggcaacagagctaaatcctgtctgttaaaaataagtaaataatacaaaataaagagcagagaaggtttgggccttcacaatttgctttgtgctggcattgtttttctaaaggtagagcaaaactgcaagttttataaaagggactaaaaagcagaaatatgtaacaaaaatcttaaaattatatatccttagacacagaaattctgcattaaataattttaccataagaaaatagataatggactaagatgtttgaataagaatgttcaccacaatattatttacacatcaaatcacactcaaagcatttcaacgctaaagaatgagacctcatctctattttttaaaaagttaatcctaaaaaataggagatttaaaaaaaaacaaaaaacctgtggtaatccacagaggaaatgctatgtagctgacaaaatgttaattgatatattgcttaactggtaaagaaagtttattttcttttcttcaacttaaaatcacacaaatgggccaggcacagtggctcatgcctgcaatcccagaactttgggaggccagagagggaggatcactgaggccgagaatttgagaccagcctggccaatatagcaaaaccctgtctctactaaaaatacaaaaaattagccaggcatggtgttgcacacctgtaatctcggctactcgggaggctaaggaaggagaatcacttgaacctaggaggtagaggttgtggtgagcagagattgcatcactgcactccagcctgggcaatagagcaagactctgtctcaaaacattaaaaaaaaaaaacaaaacacataaataaatgtggaggaagaaagatgaaaggggcataaatcaaattgttatggctgtagggtgagattatgtgggatttttagtttattttgggatttttttgtgctttactgtttttgtggaaaagccaactaaatgtaagtgtatttaatcatgaagaaaaacatccaatttgattttattctctagctgtacaaaatgtattcatcaaccagcctcaaaattctgccataagacttaattaactctaacaaataaagcttttcatgggcaatacttattctaatagcatccatcacaaaaaaaaacagttgattcaaactaaattacttgaaaatataaaagaaattcttgccagaaaataatgatgcccatgaacagacaagaaggtacagcattctttttctaatatatatttttttctgataacaaaattatcctactttggaaaatgtagttagtgcagtagcttgagcctggagaccggcagtattgtaaggcaaaaacagttctggcatcttcctggagtctgactgggagcatcgctggaggaaatgatggggagtaattgcagagactgccatctgtctctgcatgcagagaagtcgcagacggccctgggatgtgctgccttctagcccacttcctatgcttctactttagactccaaacagagcaagagggacgggagggagaggacggagggcaatgaatccaaagatggaaaagcagagaagatttaaaaaggaaagacagaggggcagaagagagagacccatgtcacttgttctttggaatgaaagaggacgggtgatacatttattattcaataagacaatcatatattcattcattctctcaacaaacacaaaccaggctcccacaatagcccagaccctaggttatgacaggaaagaaaaccatctttccatccaggtgaacacaatagaccagtcttctagatgtactttttttaaagacagagactcagtttgttgcccaggctgcagtgcagtggcaccacgatggctcattgtagccttcaactccggaactcaagcaatgctcctacctcagcctccgaatagctgggactacaggtaagcatcacccagctgcctactgtttaaatgttttgggttgagcacggtggctcatgcctgtaatctcaacactttgggaggccaaggcaggaggatcactggaagacaggagtttgagaccagcctgggcaacaaagcaagaccccgtctatataaaaataaattaattgggctgagcgcggtggctcatgcctataatctcagcactttgggaggccgagatgggcggatcacctcaggtcgggagttcaagaccagcctgatcaacatggagaaaccccgtctctactaaaaatacaaaattatctgggtgtggtggcgcatgcctgtaatcccagctactcaggaggctgaggcaggagaatcgcttgaaccagggaggcgaaggttgcggtgagctgagattgcgccattgcactccagcctgggcaacaagagcaaaacttcgtctcaaaataaataaataaatactaaaaataaataaattaattaattaaaataatttttttgtagagatggggtctttccatgttgccagggtggatcttgaacttctgggttcaagcgagcttcccatctcaacctcccaaagtgctgggattgcagacgtgagtagaatatattttttgttattcctctacacaaaactttgtgaccttggctcacgaacatgcttaataaacttggctcatgattttccagcccctggaatcactttttcctccatgttgcctagccaaattctgattattctctgctgcttatctgttccacagagtcatctttaactatttcttctaagccatgtgggtatttcattgaactccaatttcattaataatgagcactagacttacatgttagaataacattattctttatttgtgggcattttctattcagtttgtaaggtaggtcttgtgggttcctcacactaatacaacaagaataacaaacatctatttagcatctctatgaactataaactaggtaacatgtata

SEQ ID NO: 5698 - DNA, 508358 bp, Homo sapiens
  LOC441815 gene - 18299686 - 18768043 of chr18; NCBI Entrez Gene ID: 441815; Build 35; sequence includes 20,000 bases upstream of initiation codon and 20,000 bases downstream of termination codon of the gene
tcaacttgtttatagtgatggcttaaagataaattgatcttacacttagaaattattctgactttaaaagtttagtaagaatagtaagaatgtgttagtgacattactcaccttgccctctatttctaagatttataaggaaactccaacagggccctgactctccagacccagcatggcaacattgaaagattgctgaaagagcaatttcaaaagcacagtcttgcagaaatattcttactttcataacatttacataatcaccttgaagattaaaaacaaatcttgctcctctgtggctttttgttacttgacaagaatgttggggtgcccattgatttcccaaagtatgggggtgcttctttcccagggcagttctcaagccctcagatgcagtttgatgaattggtggaacatttttgcaacttttgtaatctggtattgatttactctcttcatctcaaacccttccaaattgttattttattggggagggaaatagggataccacaaagtgacacatatccttaagaagtgttggcagccagccctttccaaccagaaagtgcagtggcccccacctgtctctctcggtgggacaacatgtaccagggtttccttgcagggatacattacattcaaaggcaagattgttctttttttaaaaaaaaattttttttaatctgatgctcaaagctttcccagtgacgtatgtctgagagcctgtggagttttcctgccatccattctgtgatagtgaatgacaagggactatcctaacgcagtgtatggtgactgtgtggttgggtcacccatggcaacagggtgaggaggaacattgagactgggctctgatgagcagcagagccccagaggatgatgaagtggtgagtgattttcaaagcaaatgaatttatgacaattcccatcgtggctactacaaacgaaatgaatggcggcctccaaatagtagccgggaggagaaccaaggatggtgattttgcaagaaattcttttgaggctcccactggagacgcaaccacccctgcaggtgctggggtgttgctaccaattgtggaggacagcatctcgggcagcaaaggaactgcaccaatggcagactctcatggtgctgggagcactgagaaaaggagggaaaaggtgttcttctggtcagcaaatccaaatgggctctgggagtggaagactccagaagaaaaatttgtcttaagatgagggcaatagaggagctgtggaaaggcctttgaacttcagatcaagggacctcactcacaatttccactgcctctgactggctgtgtgcgttttggtaagccttgtccctgttgagcctcagttacagcttgaggaagttgataatgtcaaggtcttcaggaatggtaacaccatgacgtcactgggactgactggaagctcttactgcaagggtgtggcattggtggaactaccaaagaggctctgattgcttgtagagttcacaaagtcgttgttatctccagctgtagaattaaaatgttattcccgctactatcaagtcagtggcccaatggccttctttcagtatcttaatatatgccaacccctttctctacctcagggcctttatccatgctagtctctgtacatggaatgccattttccaaagtctgaacctggttaactgatccttgagatttatatttaaatgtcattttctcagattagatttggtacactgctagacagtcccagggcacccagcactctgctttaaagcacttatcaccattataatgccatccctatttgtgtaattatataattttctcttttccactagactggagctccatgaggatagtagccattctctgtctgtttcaatataatttacttcaatggccaatacctgggacaagcctctattaagcatgcaataaacattcattacagattgaaacaaggggaacaataatcacttttcttgagtatctgcatatttcagtctaagtgaagtcttagatttatccacttccttccaaaaaaaaaaaaaaaaaaaaaacgagcactgtagtaagatgttaggattaatgcatcgtttgatgttttagtttgcatagcacttccactccatcggtgcgctctaccacaaaagctcctcataatgttttccagagggccaaacattttcaaacatagaggattaagtctgatggattgtaagctactcccaaaagttagttagaactttgtggaatttctttattaacagtgttgaaatcactctcagtcaacttcaaagtgcatttccttcttctgaacagccagcaacagattactcattagatttggaataaactaatgagatatgacatgtaagtaaagtattaaaaataaagcagcttggctaattgaaaatgtttattttatgaatttttagatggcagtggcttaaaataattgccgatatgcaagcttggcattggtagtttcttccccactgtaaaaagctgtgtaaaaagcacagcaaatatactcttttgattaataaagtgacaaagctcacaaataccagaggcttaaggtgactaactgtcctgatttgctggggactaaggggttttctgagagagggactttcagtgttaacactgtgagagaccccagcaaacccagatgactggctaccacagaacacagcactgtttggaaaaccccacccttggagtctaatcccagccctgcctgtaggttaggcctgccctgggcaactttatgggatcctcttccctgatctgtacaatgaggccaatcaaggaatggtcaggtctgaaataaatgacattcaatattctataaaatgaagaatatggccatgcaacagcagggatggtggggaaactagcagagatgacaatcttaacactagcatttatgcaaatcaaaaccaccatgagattccacctcacacccgtcagaatggctattactaaaaagtcaaaaaacaacagatgctgatgaggttgaggagaaaagggaacacttatatactgctggtgggaatgtacattagttcagcccctgtggaaagcagttggagatttttcaaagaactgaaaacagaaataccatttgacccagcaatctcattactgggtatatatccaaaagaaaataaagtgttctaccattcactcatatgttcatcatggcattattcacaatagcaaagatatgaaataagcctaagtgcccatcaatggtggattggataaagaaaatgtggtgcaatcaaaaagcttatccatcacaattaagtcagcttcatctctggaatgcaaggttggttcaacataggcaaatcaataaatgtgaatcatcgcataaacagaactaaaggcaaaaaccacataattatctcaataggtgcagaaaaggcttttaataaaattcaacatcccttcatgttaaaaactttcagtaaacaaaatgtttaaagaacatacctcaaaataataacagccatctatgacaaactcacagccaacatcatattgaatgggcaaaagctggaagcattcccccttgaaaacaggcacaagacaaggatgccctctttcaccactcctgttcaacatagtactggaagaggaagtcaagttatccctgtttgcagatgacatgatcctatatctagaaaaactcattgtctcagccccaaagcttctgaagctgattaaacttcaacaaagcctcaggatacaaaatcaatgtgcaaaaatcactagcatttttatacgtcagcaacaaccaagccaagagccaaatcaggagtgaactctcattcacaattgccacaaaaagattaaaatacccaggaatacagctaactagggaggtgaaagatctctgcataaagagctataaacctctgcttaaagaaatcagagatgacacaaacaaatggaaaagcactccatgctcataaataggaagaatcaatatcagtaaaatggccatactgcctgaagcaatttatacatgcaatactatttccattaaactaccactgacattcttcacagaactagtaaagactattttaagagtcatgtgaaaccaaaaaagagtctgaatagccaaggcaatcctaagcaaaaagaacaaagctggaggcatcacactacctgacttcaaactatgttacagtactatagtaaccaaaacagcatggtacttgtacaaggacagacacatagaccaatagaacagaatagagaacccagaaataagactgcacacctaaaactatctgatcttaaacaaacctgacaaaaacaagcaatggggaaaggattccctattcaataaatgaggctgggatatctggctagccttatgtagaagactgaaattagactccttccttacatgatatgcaaaaattaactcaagatggattagacataaatgtaaaatccaaaactataaaaatcctgtaagacaacttaggcaataccatttaggacataggcatgggccaagatttcatgacaaagatgccaaaagcaattgcaacaaaagctaaaattgacaaatgggatgtaattaaactaaagagcttctgcacagcaaaagaaatatcaacacagtaaacacacaaccaacagaatggaagaaaatgtttgcaaactaagcattcaacaaaggtctaatatccagcatctttaaggtacttaaatttataagaaaaaaacagccccattaaaaagtgagcaaaagacatgaacaggtacttctcaaaagaagatatacatgtggccaacaaacgtatgggaaaaagctcaacatcattaatcattagagaaatgcaaatcaaaaccacaatgagatatcatctcacaccagtcagaatagctactattaaaaagtcaaaaaataacagatgctggcaaggttgtggagaaaaaggaacactatacactgttggtgagagtgtaaattagttcagccactgtggaagacagtgtggcgattcctcaaagacctaaagacagaaataccatttgatccagcaatcccattacggggtatatacccaaaggaatacaaatcattctattataaagacacatgcatgtgcatgttcactgtagcaccattcacaatagcaaagacatggaatcaacctaagtgtccatcagagatagactggataaagaaaatgtggtacatatacaccatggaatactatgcaaccataaaaaagaacaagatcatgtcttttgcagggacatggatggagctggaggccgttgtccctagtaaactaacacaagaacggaaaaccaaatgctgtatgttctcacttataagtgggagctaaatgatgagaacacatggacagatagagggaacaatacacactggggcctttcagaggggggagggtgggaggagggagaggagtagcaaaaataactaatgggtactaggcttaatacctgggtgatgaaatagtctgtgcaacagactcctacgacacaagattatctatgtaataaacctgcacttgtacccctgaacttaaaataaaagtgaaaaaaatgtggtgcatatacaccatggaatactacaaagccgtaaaaaaaaaaagaacaaagtcatgtcctttgcagcaacacggatgcagcaggaggccattatcctaagcaaattaacacaggaacagagaaccaaacaccacatgttctcacttataagtgggagctagacattgggtactcatggacctaaagatgggaataatagacactggggactattggggggctgaagagagggggacaagggttgaaaaactcttgggtaccatgctcactttctgggtgccaggatcatttgtacctcaaacctcagcatcacacagtattcccgtaacaaacctgcacatgtaccccctgtatctaaaataaaagttgaaattataacaagcaaaacaaaacaaaacaaaaaaaaccactagcatttgtaagccttattggagttaggacttcacactgcagcaccaaggggtgggggcctttgtgtttcgagtggagaccatgagcagtcaggggttcgctcagctaattcacttcctctgcagaacgactccatgggagtattcccatggctcccattttataggcgaggacaggaagaaaaaagagggtaagtgaaagtttgcttgaaggtcacccaaagggggagccgatagtcagaccaggtcagctctccttttggccaaagtctcctgaccgctgagatgaaaacagcggtgggctcctccagggagggtttggagagcagaagctaaatcagccacaggttccttttgtgttgattgagtcacaaagcctccaggagctgccaagtggcacaagatgctgcactaggtttggaataagaaggcccccagacccagtctcacccccagcttggctggggcactaaacgattttaaaaataaaactagagaggccctgcgtaaacggcaggggatccatgtccacctgacagcccttggagctaacgctaagggaggacagcttgcaacaaggggcacggggcctgagataaaggaagcggtcacctagagggacgggccatctgtcaagccagttctttccctcccctcccttcccttcccctcccctcccctccttttcctttcttttcttctttccttttctcttttctttcttttcttttctctttctacagtctcattctgtttcccaggctggagtgcagtggtgcgatcatagctcactgcagcctcgaactcctgggtttaagcaatcctcccacctcagtctccccagtagctgatactacaggcatgtgccaccagagtcagcatttttttattttttattttttgtagaaactgggcctctttgttgcccacgctggttgcaaactcctgggctcaagggatcctctcacctcggcctcccaaagcactggaattaacaggagtgagctactgtgcccagccaagcttgttattttcttagggagaggacatcttagtggcaagagcacatgtcttgcattggtctccagcagatttgaactcatcctacctctgtgccctcagggaatcttcccaacctctctacatggaagcatcctcatctgtgacatgaagcaaagaacagtgccttcccgtgcaggctctttttgggattacaccagaacataggcatgctcaataaatggcagctatttgcatttacaggctcacaatctcttctctataaaatcccagatccaaaaaaattgaaaaccgaaagggttttggtaactcatttgacaacaaagactggtcggatctaaactcatttgacagttaaagctgaactgaattgctactagactatttatgttgtatagttatagttaaatatttagctgcagaaatataaatatgtttgattaggggatgctactccagaccccaataggggatgttacataatatgcagtatgtacacatttcttctctgaaatctggacaattctaaatcatgttggtttaaaaggtttcagaaaaaagattatagacctatactgtggtgaatctcaggcccacgtccctcatcaggagcagcatggctcttacatggaatcctggccttagaacccaagtaaagcgtcagcctcagaataaggctccccctgttctgtagagccttggctccatcagccctgctcagaaaaatggcaaggaggagcccgatttattagctgttaatgctgttgtgcaataatcttgatctccaagttgcaaaaacccagttggaagagagaaatctaaagcgatcagaatgactactataccaactacagaaaatatacgagtttcatgagaagtttcaggagtcagactgacactaaagttgatggaattttaagaaaaagaatgctacttctatttagcattaagttatttttcttctattgtagtttaattgtggtcctatctgaagaaaagctggacttgaagccaggatttggggcataagggtatgacagtggcaagcccctgtgtcagcagctttcacagaacaaggagaaagtaagatcaagttgcaactggaaatctgggtgcacaggtaccagaaaggaagatgctctagctggggagtcaggatttagggggtcaggtgggaggggagggcaagtggggaggtaagaatgtttagccatgaaatttggaagaggtgaacttggtaaagaggaaagaggtgtgtgtagggataggcagggccatccctgttgctgtaagtggatgtctgtgctgcacacataccttactggtccacattgtccccctcaccgggaacctactggaatatccacacctgcacctgccatggtgaagccggaaatgcactctccccagccttggtatatcttgagcccaggacagggcacaggtaactatcatccaagctcactttcaacacattgctgtgccctctttctgggttgctgaggtccacctgcaggaggctaggagggtgaccccagagtccccgtgctggagtgtgaatcccaacgctgtatgaccctggtcaggttacttcatatccctgagttcagtttcccttttcataaaatgggatgatagccactgcacctgactcctggagttccgtgagggtcatatgagacagttcctgtaaagctgatgtgggacccagcacatggtgatttccccatccgtgtacccagtgcccactgcttggtggcagctccagggcttccagccatgccaagcagcccatcttgtgcagatatctgcaatcccaggtaagatgattgaaccttaaataaataacagcattttattttagggtctcctggccagtagctgttcatttggagactcattattttcttgatcatattaatttaagctctcagtccccaaatctctcagctaagtacctttgctacttcctacttttttactcacagcaaactcatgcctggctcctctttccagccttcagttgtagtagtatccatgagagtcccagttgtgcagttttgctttgaaaggattaacagagtggaaccgggactgcagttacaggcaacaaggtggcaccgcgtctaagatgcctgctcttttgggattctttcaacacttccaagttttattggcataaatgattttaagaaccttttttccacttcagataagaagttctaaaacagaggccgttcgaacgataccctttaggattagaaaaatgttcactttgccttttctctccttctttgttacgtcttgtttcttatttacactgagagaggtttctttgactctcagagcacccgcctttatttcatgcttccagtgcagctgcttcatccaaaatgaggaagggttgcaatggaagagaactcagaggagggctggagacaggaccactgtaccacctgggtcttggaagctgccttccaaagactggcccagacacagcagaaggattacttaacatggcctttatcacttccggggcatgtggaatgctgaatcctaattctaaaatgagtcctgaaattgtttcagtaaaattcatcattaaggacttaaaaaataggagatgagaagtaggagatgtgaaagaataaatccatggaacacacatgacagatttagcaaaaattaaaaatttcttcactttgacacttacctgaatgccacccagagaaaattcagcacatgtgccaggcatagtgacaagcacagtatgacatcattctattgtgaatctcacaaggtgcctgttatggctctggtgacttgcctcagacagaagagaaagctgaggctcagagcagttagggaggcaggtctgtgttggagccaggatgcaaatacagggctgtctgtccccacagcctgtaccttgctgtgtgccttcctcagtcagcacaattttatgggactaagcgttttagtcatgatacaacagcaacagtgaattcagaaatgtaactagatgttctttcttctttttaaattaaactatctcatatttgctcctgtttgatcccttttgcaatttttattcatttattttcttattcactcattcactcatttggcgctctctctctttcacacacacacacacccacacacacacacacacacacacacacacatgaataactactaaagtcattgtccttgaagaatttaaagtggaatctgtttaaagtttgctccaaggtgtagattcatgcattttaccggaagataagaggaaaaagaaaaaggagagataaaagcagtttggagacaaagggaagagatgacatcttacaagtataaagcctgttcaataaaatgtgatttcatgattgtcatttgacaacatccctggcttttgtttgtttgtttctggtaagtaaggaaacaaatgaccaatgaccacatccctgttgtttgtaagctgcactgtgaattcttgtgaagaacagtgtaaaaacttctctgtttacagggtagagacaaatttactttccatttctgataacaacggagtcagtcttccctgctgccgaggattttttgaaacagcgtgaatactgctccttcgcatttctgagagagggcagaaccgggtcatcgtgttgcttgacagagggccatgataactgtctacagatatttaaagggtgtaaatgaagacttgattgctttaagatatcttggtactaacttcgtttattaaagatgcaaaagatttgggtgaggtatgtcagagccccaatccttcagaaacattttacagggctgggggtatgacccacccagtgagtggaacttgagccctgagtggagagggcctttggggactgtatcagggaggaggacacaaagccgtggatgagaccggtctcatcgtggcctctgcaaagacctcgcaagggaggacaatcacaacataatggcattccagagcagtggaaggtattcattagcactccagtgaggagagagaaaaaacagaaggaggaacagagaggaacagactcaagctcagggaaatggacattatccagcttgttgacagagacctcattccgtttcattcttgactctgcctgtccacctttctcgtgtgtctctgttctttgcatcttccatggaaacacgggatgagaacagggtgaaggctctcagagcagttaaattgtattcctttttggcaactctagtgaaatcctgtctgatgaatttggaactattgattgcgataaagttattaatattaaagtttcttggaacacttgtggatatcacttatccagatagcaggtccccagttaatatagatgattgaatttgggagataaatgcactattctggggggcaggaggtgctgtcgcagaagaaaatgaaaacacgtggaaaggaatcatgtcaagcttaacatccaagttgaaggccaactatacggaacttagattttttaataacctgtaaatggtctcagaggaatggtgaattgctgaagtcttttgagtggagtaagtcacataattaagagattatttgtaacagactcagtcaactacagggtattattcaaagcaaaaaccaaaccaaaccaaaccctctggatcagaaggcacgaagatgtagacagcgtctcttatgccttatgtaggaagtgcctaatgatttctttgcaaattctgactagtataagtcctaaacaagaggcaaatgtcttagtgtcgtccaagtgctataaatgaagttaaatgggaacatacggttaacatttctataggactgtatgtttgccaaaaggttaataatcacttgttccttaatattcataacatccctctaaagcagaatttcccacactgggactgggaggcctcagggatggtggaggaatttcaagagggtcatggggattggagctgtagtatttcaaacagctctccaatggtgatggaaaattgcgggctgcaggagggaggtacggagttcccggcaccctgtgttcactgggcaagtccccctgtgaggcctggggccccttgtcgggaccagacctgcttcgttgcaggaatcctaggattctttttccactctcccgtcctcatgtcagtgccagctcccactctaggctctggaggcttcggggcctgttttgaatcccagatttgatccttgcttgctggatgactctggcaagtttcttaccctctctgagccttgagtacaacactgaagaatgttggatgatcacttacatggtgcagttgtgaataagatatcacctttagcacattatcagcgtccaatgattaatagtagtagttatttgttccctttgtctttccaggtacttcttggatgtttcagaaaacaactacaagaatcttttcattttgaggactgtcctctgaatctctgatgaaagcaaataggagatacatacccatggaacaatacaaataaatagataacatcacaaatatttcaatatttcaatactcaatagagtacattgatatcatcaagcttaatcaaccctgcacagtttattgcttctgactgccttgcagacataggtcaccgaaaactatgtttgacctgtgcccctgattttacccctaaagactccagctttagcagaggctggtgacttttgttttccaggacagtctattttcctgggtgatataattaaaatatgataagatttttttttttgaaggacaatagggagtctttgtcccaaaaagaaaatctacaccttcaggtgtgcctgtggccactgcatcaggaccccgcccttcacacgcgttattccattctgaaaatgtccgaacactttcttattttccatgtcccagtctttaaactggattgaaggaggaagttgaagctacagcatttgatgagagtggtaatgagggtggcatgtgcagttcaactgtagcttcttactatgtagagtatccgtgttctaaagcgaagccttgtgtgatcacagttccagaaaactgaggaattcaatgactcagatactcagtaacaattaaaaagttcttcatttagtgtttcagcagagcggggaggagacagatttcctcctgtgcagccctgcttaaggcggccagtccctgcaggaggagaagcagatctcaaagttgtccctcatccatacaacattatatttaaggagaattcctgctagcttagaatataactctggccaccacccacttccccatccaaatgtcttgcagatagctaattcagaaagcccggacctgacttagagatgggtagtattcaaaaaggaacacacacagtatctatagatgaaaagagaatgaatgaaacaagaaaagcaaataaattaggtttaaaaaagctttacagccgggggcggtagctcacgcctgtaatcccagcactttgggaggccaaggcgggcggatcacgaagtcaggagatcgagaccatcccggctaacaccgtgaaaccccatctctactaaaaatacaaaaaattagccaggcatggtggcaggcgcctgtagtcccagcttctcgggagaatggtgtgaacccaggagacggatcttatggtgagccgagattgagcactgcactgcagcctggctgacagagcaagactctgtctcaaaaaaaaaaaaaaaaaaaaaaagcttcactagaaaaatattgccacaaaacagatgacatttatgacccaacatactttcatgaatttaaaaagaaaagaaaaaacttagtgaaacaatcgcctttaaaaaacaggagctcaaaaaaacatatacagtagtttaggaaatatttagcaagacaatgggaagtgaaacataagttggcagaacttagcaaaaatgacaacctagaaaccaagaccacagtggaagcagcagaacggagactcagattctgctggaaactgaccatatccaagtccacaaagaacatgttactaaacttcagaaattagactgagtccagaaaagcttctctgatcacaaagcaattcatttaaaaactaataataaaataaggaaggagaaaaattctaccacctggaaatgctaaaatattctttcatgtgcaactcttccattagggatatatttttaaaaataaaaataattaagggttatatttttataaatgaaaataattaagctagtacatatcagaacctatgggacagagctaaagcagaattctggaaaaaacttaaaggtttaatatttatattaatttaactgaaagaaagaaaacacctaggtatatattttttaaagctaacattttggtaaaaaggaatgtgagatgtgggcaaaaaaaaagagataaaaataattttgaaaagtgtaagagtaaaaatttaacacaaagtgtaagtcatataaaatgtaactttaaaacgttattgaggagaaaaaaatgaaagaaatggaaaggcatgacatattcttaagtaggaagacttaaagcaaaaaatttaactctcccaatgatatctataaatggaatttgaagccaataaaaatataggattttaaaaagctagataagctgttactaaaacttataagaaaaatcaacagacattccatgtctggtaataatggacttagttatttagattaattcttgcagttaaaacaatgaatatttggataacatattaaacaaacttgattttaaaagcactgaaaagctgacaagataatcaggacttcccaagtgattaggttttgccctgattggattttgcccgtggttgatcaggttaagttgagttggctgtggttttcatggactctcagaatgaagaatacggaagtcaaaggccaagactcacccaaggtaggaaggagggtctcataggagactcttgcctcacattaagctgtgagtctgaaggggttcaccttcagggtaaggacaaaccaaaggtgaacctgctccccttcccactaccccaggggaccatgggagagttaccttgacactaagcaaagcagagaaaagaaaaagaaaacccgtccctgataggacgtcatcactgaatcattggctggcagtatttgcccatatgctgctcaaatacatgtctttgggatgagccaagaaactttgagctatgaatttaaagtgatacacaactacagtacccccaagcacctggcagaagcaagctctaatcatctctggaggcagatactttcatcctaggcctcgaggattttgtataaatggtttctcaagggcagtaagcagtacagttgaagattactaaactcagaaaacaaagcaccaatagttaatgtcagcaaaatagacagcagaggcgagttagacaactgcagctgtttgaatgaccagacacagagtacaaagagctatgttaattttatttaaataaatgtaaggtaagctttaaaatatctgcaagaaatagtcaacaataaaaattgacattgtgggttagaaaaagatcaactagcacttctaaaattaaaaatagagtaacagaaattgaaaagtcagtgaatgggtatggtggcagattagacactgtggaagacagaattagagaactgaagataatgtgaataaattatacagaattatagtgcaaagaggcaaagaaatgaaaaatataggagagtggtaaagagacgtagaggacagagagagaaggtctcttttttccaagatggtctttcttctctttcaaaagtgtaattgttatttcagaagatgagaaaaaagtgaggtggtaggttattgaaagaacaataataactattaaagataagtgaaaagaaatttgcatcaaggcacatcacaaagaaattgcagaatacataaacaaagagaaaatctaaaaagcagctagctagagttggggtgcagtggagtgtgatgattaatgaataagactaccctaccaggtgtcaaatgcattgtaaagtggtatcaattaacacctcatggtattggtatacgggtaagtagatagaaatatatatggtaaactagtatataacagaagttggtagcttaaatcagtagagaaaaggcagcttaagtcaataaaggacactaaaatatatagacctctgaaaaaatatgtatatactgagattccaatgaacccaaaatttagaaagaaaaaaacctcagaagagtactagaagaaaaaaaaagaagatactttaaaaataaattcagaatagtaaaggcttttctacatataataaaaaactgagaaaccataaaataatatattgataactttcactacccccaaaattttaagtgtgtcttgtattataatattatataatatacagttatataatagtattatacatgaataaaagcaatgaactggaaaaaacatgtgcaactcattcactgattaaagataaattctttttagatgtgaagaacttatacaaatcactgtgcaaatattaatcaaatgtaagatggccaaaagctctaaagcatttcaccaaaataaaataacataaaataaaactatcttccaaccatataaaaagatactcaatttcattcataaaaagggaaatgcaaatttaaactaaaatgtagtactactgctcaattatcaaactggcaaagataaaaacatttgacagtaccttgtgttggctgtgatgtaaggaaatgtgttctctcatgcatcactggtgagaatgtaacttgcactatcttctaggatcaagattttaaatcacgtgccctttgacccagcaccttttcttctaggaatttatcttacagttatattcacaaatacatggaatgagctcacaatcattcattacaacattgtaaaaagcgaaagcttagaaacaacctaaacgtttgtctatgggggtcttattagcctcccgccacagtttgttttttatttttctgtcttactactcacatccacattacatggcacacttattctagctctcggggctctgaacagtcccaggtttccaggcttgtaggatatcaggagaggagagagatgctgctaaaggtagaaccagtgacaatgggcagctgttggcctgaaacgaaaagacagataaagtacagaaacatccaaagaactttaaaaaaccacagttctgtaataccatacacgatttgaatttctgtccttttgttcctgtaaaatctttgcaagtgttttaaacctcctgacatgcacattcatctttatttaggcttctactcaaatggtccacccttctttcttctcaaacagcccatcagaggctcattcctgagctttgatctgttgcagtgaccgatcctgtcagctcttctcctgtggccataccgctaccccttctctctctcaaggctctctcctcacggtgtgacgctgctatccagggccccttccccttgggatgccctgtctccactttgctgacagcactcctggtggcccccaggctctgccctccttttctgtcttcttcctggagtccctctctcctggtgctgtagcctgctcctgtagctccacatgccatttgcaatgcacccgtatccccaaatccaaagcaccctctctctgtgaattttatctctaattttagttttcagttaaaaactgtttttaacccaatctttaaagtgccttgcaaatgctcttcctctgcatgaagccgtccttattctcgcagttgggattgtggcagcccacctcccaatccctgcccatgctttctcatgggtgtaatactaacccccagggggcaaaaatgggttcttggaagaaggagcaaaaaattctgttcctttaatgtacaagtacagactacatatagtatatcaacagacatatggtatatctgtgatgtcagagtctcctgggggcagggcaattaggaaaaaaaattcttaaaaggctccttatgaaggggtgatcatgaaaggaaggttgagaaacactactcttgacatttgcaccaagatgtcaaggacacacaccaagcccatcttgttcaaaacctaatgagctcccctccctcatctcactcctgattccccaacccacaccgcccatacccttgtcacagctaatgtcatggtcagtcagccagtgcccatgccagggtccttagtgatagttggcgcactttctgtcctcacatcccatatctaatcacgctgtatcagtccgttttcatgctgctgataaagacatacccgagactgagtaatttataaagaaaaataggtttaatgaacttacacacagttccacgtggctagggagacctcacaatcatgacggaaggtgaaaggcacatcttacgtggtggccaacaaagggacaatgagagccaagtgaaaggtgtttccctttataaaaccatcaggtctcgtgagacttattcactaccacaagaacagtatggggggaactgcccccatgattccattgtctcccactgggttcctcccacaacacatgggaattacgggagctacaattcaagatgagatttgggtggggacacagccaaaccataacacataccaagccctccaggttgtactgccactttctctcttgcacctgtccctcatgccatgccagccacctgcctgagtttagggccaggtcacctcttgcctggatcactgcaatgaccttccaaatcgttttcaccccctccccactctaatctatctgtcattctgccactagagagaactttctagagcacaaactcatgatttaatgttcatgtatttgaagtttgatttcagtttgcttcaaatagaaagtctctagaataaaagacaagtccaccagcatttttccagatccctttcctgtattcctctacagtcatgctgtattctaccacagttgactgctgtgccttccctggaattcattctatatgttcatatctttctgcctttttttgtatcaaatctcctcagaattcctttttccactcttttcacctgaactattcttacctcaaggcctgcttaaatgttccatcttctgttgagtcttgcctcatgtgattccgggcagaaacacttgctgctttctttctgcttctgcagtgcaacacacgtgtttatataacagggaatggaccacattgcttttcagttgtcctccttctatgtaaatttgaagaaggatacttatcaaattgacacaggttttgagaaaaatactcttacgtgcaaagtgttgtgctggacattggaacagtagaagtgaataaagaaggcttgccttcatgaagtttaaaatctggtgggaaagacatgtattcagcaagtcattttaacaaataatcatttaaatactgctgtgagaactgccacagtggaaagatataggatgctatgaaagaaaaaacagagaaatccaccttcccccaaaggggtcgacacagcttttctggagaaaaggtctttaaactaagaccagaatgagttagctgggtgaagaatatattccagggtgaatatattttgggcagaggtaatagcccttgaggataccttgtgataagaaagagcctgagatcattgaagaccagaaataacaaaacaaacaaaccaatatacaaacaaaaagtgggtgtacaggtaataagagagaggtgtggcatgacaccaccgaatggatttatgacgaaaggagtcacttgctgaatctgaaagggaaacttcatcttctctgcctcctggcaccacacagataggccactgacctgggtccacatggcaatgtttttgtcctttttgtcatattgcctgaaatatagactcagaaatatttttttctatgaccaaaaaattgctaaaaattctgatagaaatggatgattcaggcccaacaccttctagaagtactccaatttcggtatgtgctgttttgagagcccacgtcttacacaagtgtctaacagccatgtgaggtgtgatttttcaggatatcaccttgatgcatggtaacatggccccataatgaataagagcattttactgtacctgaaactctggggtcaagtcatatggctacgaatgtggagcaaagcaatatggaaacaatatgttcaactttatgactagtaactcattggctcatggacagctttgtcccagcttctctgggggtagttttcctgctgcatggcacacatttgaggagcactggaagtcccacagtttttcccacactacagtattctgagtattgcaagtagagatggaacggagagtgggtttgtcaaaataagccagccccacattgaaaaagtcacgtgtgcttggtgctatccacaaacatgagtcacccagggaggtatgtagatgcttgtgacaagagaggagaggcctaaaaataacagttccactgaagggtggagctacaggctgctggtgtgtcatgtttggctgctgcttctgaaaattccttcagttaaagtagcaagtgggatgacagctgcagatacctggctttcaggagagaagtgtagcaggtatccattgaggggggatttcagggtcatgaactcctccttattacttatttcctgaagctgatgtgtgaaaatccatacaagaatcccacatctttagttaaagactttgatccccaataaatcagaacgacagcacattcggctgttctcagtgacacatttgaaggttgctggagatacaaggatgctcagagtgtcttcttttactttcttttaactttctcctgctgttccatatactacatgagggcaaggaccttgtttgtcctgttttcagttccatcctcggtgtcttgcacagagcaggagctaaataaatatttgcttaaggaaaaatggaaggaatgtgtctagcccagccctcttagtttgcaggcaagaatactgagcagggagaagaaacttgctcaggatcatgcaacctatcagcaggggtaggagggaagccagcctctgactctccacccagtgctctcacctttccaacaagctagcaatgactcagtgtggctagaagtgtcttgttgagggcaaagaccaaacacgaggtctctggctactaggctgaggtggacagtatggggcagcagttctgaggggggccaaaagatagtgaacttcactgggaggaggtgacaaagacaaggcttgccactggaggctgcccagcaaagtttcaagggcacagtggtgctcctttctgagcctgttgtgtttgcctaaatttgtttttaataaaacctaggagaaaagcacaagttcctggagcagcaggggctgatggcttgtggtctgctcaggaccacagacttcaccttatgcagacagctctatggtcattaatactgaaggcatgtgtgctttttttgtgttttgtgtttttcttttaataatcagacaatagtttacatctgtgcattggcgaggagtcatgaagaagagcatccaaacaaagatgagagaagccagactggcaagtgggctggctggaaaagagaagagaagccagacacagtactttgtctttagtctccatggataaaaatgcttaaagttcaccgtggggagaagggaggggagggaaaggtcttgaaggattcccagtggatacaaacaatggtcatttttgaagccagtttgcatttagtctcacactctcttgtcttaaaacacttctgaagcacaaggcttctgagagagtagggcagttgcaggagcagcaggagggggctggggtgggactggggtgtagggagaggcctgaaggaccctcctggccccacattcctcaaggcacctaacaaggaagcagaaccctacctggttagaggtccatgttccagaatcgatgggttctactgctgtgcccagtcaacaggatacctaagctttgactttgggtcactaaagattgtttctagacaaaagccctagctcacaagtctgggggcagcttgggactttgtttaggccaggtttaccagcttggtgtgagaatagcatcagatattggttacagtggtgggatacattccaagactcccagtggatgcctgaaacctcgagtagtactgaccctacatatacatgctttttccatgtgagaactgagatgactactacgtgactaagggtggggagtttctacagtgtggatatgctagacaaaggcatgattcacgacctgggcaggatgacgagagatttcatcatgctgctcagaatggcacgcaatttaaaatttatggattgtttatttctggaatttttcatttaatatttttggaccatggatgactgaagataactgaaaccttggaaagtgaaattgcagataagggagattactgtacaggtttacgttgactcagtcttcctactatggcttgaatgttcgtgtcccttccaaaattcacaaaataacattgaaacgttatccccaaggcaacagcattaagaggtggggcttttaggaggtgattaggccatgagggctctgcccttatacatgggattagtgccttataaaagggctggggaaaaccagctaggtcccttttgcccttccatctctttcacaagttgaaccaacaaggtgccatcttggaagcagaaagcagccctcactagacacagaatctgccagcacctcaatcttggacttcccagcctccagaactgtgaaaaacaaatttctgttgtttataaattagtctgtggtattttgttatagcagcatgaacagactaagacactaccccggtctgtgtatttgggcatagaattaacaattatttgattctctctccttgccacacagctgctgccaggggatgggggcagggtggtgtcggcgattcaacactgtctttccttctctcttcggtgcctctttccttgctatggtgttaaacacaggtactgtgatcactcacctgactttcggttcttatggcggtgctttcttggtggatggtggttcaatttggtgttcctttggcaaggtttgggtgggaaccagtagctttgatcaagctactgcatggaaaatcccacagggatcaacttacttcatgttatagccagagcaggttctagaatctagtgctcaagcagcttgtaggatttcaatttagagattagggaagctccatcagctgaagtagggtgaggctggttaaggaatagaaataaaatggaagtagttcagatcatttctcatttaaaaaatttttttattaaaacaaataacaatcttctgattgattgtcaaggacgtgacggagtctgagaggctatatattttgaattcgggttgtaaagcacagacatccaaaccaacagaactcccacacacacttcaggaatgcagagggtttttgtttgttttggtttgtttttttttttttttaagttttagtaagaacattttctaaacatatactgaataaggttgtacttgatagtcctggtaatggtaataatgataactgagaaaaaagtggagaagtaaaggaagcagaaaaaattaaggcaatcctgacagcaattcagataggtaatctacataaattagtcagtttccttatcagagatttacatgttaaaaccacttgatataacccagcaggaaattgaacaagtgattctatgtccagacttggaaacaaaaataaccactcagggtctgcacacattagtttgctcaaacttgcgctgataagtctttttggctagagctatagtatgcagtttttaagaggggagagtttggttggaggatgattgacacggaaacaactgcaaatccataatacaggaaagatataagcttcagcgagtacctggatgtcactgagatgatgcagatgcagagggtgacatgctgcacgggacttagcattgttcgtggtgaatcaaaaagaaaacccaccccatcagctctgtaaaacacatccaatatcttaggcagactgacatcttacatctgatgcactcacacaaagatatttcacattctcattttaaatttgtacccattccagggtttcttagtgtttcccagagaataagaatgattttgaaatttgtgacttgtcactttggggacagacactgcctgtcaagctcttcaggccaagaccccaaggttcccccagcagccctcagacgcccgtccaaacagtctctctctggtctccaagagttcccgtgcataccacatgcatattctatttatatgtttctttgtcctgaacaagatttggccccattgtgtgggagcaacaccagaaaagaaaaacaaaatccatccaccgagagaaaatggagattgtgagagcttggagaaatttacatactttgctcattccattttcctgtgatgtcagagtcaaagaatatgccttttttaaaaaaatcacacacacacacacacacacacacacatttcaaaatgctgggactcacagctctgtcaagtgtattgtcattaaaaggagaaatgtaaacactcttttgcctttccctccacccccttctattccccccatcagcccctaaaaaaaactaacaaattagcccagactccactggacagaattaagggcccgtctgcaaaaggccgtggggtattaatggagatggggctgaggctggggcagggacgatgtggaagtgggaggccggaatgtgatacttgaatctgggtgactggttctttatggaggcacagaaaagggccggctgacactttacagattgagtgtaatgttcagggaatttggcatttctgccacgggctctggctgccctggtaactgctttccttctccctgctggtaaaagtgcaggagaaaagggttaaataaatgtttgtgatatgataaggtgcttgtttattcaaggaatgacagattattggctccaaaggcagccctgaaaaatagtacaaaggaactggctctcccttcgcggatgatgtgatttcctcctgagattctgctctttcctaggaacaatttgccctgggaattaagaaagatgatttccctgccatcagatatgaacatggagttggcgctgagggctggagccccagaagctggctgggaactgggatgggcttgttttggggaatgactttcctgcagggatttttctctcactgccctcaggctggcccagcacagagctcagcttccagcatccacgtgccctgcttactacccagaaaggctgcagggcatcagcgtgttgctacttctgagagcctgggaaaagaagttacgtactcaggagggggacttcttcctcaggaaatcctggtgccaggtctgcctctagccccagactgctgtgttcatcccctgaccattcccacatggcatggacacatgtgcccaggatggcatgcatatctgtccatttccacaccaacacaagctgcactacatgagctttctcctgttgtcctctagtgatttcatagctagtcctgcaggagaattcagttccagatccccaaacaatgaggcattcacctaaagttggtgcacttttcctcggggagcaaacatcagtggctgccaaccctgaaaatcacagagatctgtacgagggggcctgtacaagtgagcctagaagggctgtgacaccttgctgtgcactgtgagctgttccgttcatgcccagcttctggatgctgctctgaggtggcttccgcctgcagagcaagggttctgagcccagcatgcttcagccacaactcttcctttcccctctcctggccctgcttctggcatgccatagagaggtcattcacatacttgctgactagaagggttcatacaagatgtttggcatagttctcatttgaaaagaacacattgccaaaatcaaacaccaagggaaaaataagttgttgtttaacggctgtttttctggcatcctaggaactactgtatgatttttataatggcccagtcactttatcagctgatgtgctgcttatttgtaagtcataaggcatcagcctggggaacccagtgcccttcagacacagtgactcaggtttgagccgacggcagggacgttatcgaaggtccacggttgggctatttttatgattgcattcagtactaatagggcttttggagtgtacacagccatgtgctcattgttgaactatacaagataagatccttgtcccaaggagcttactgcctgacttttgcaaaaaccagatggcagaaaatggtttccctctgcccatcagcaatgattgagggggtggagatgagaagcggtgcagtcaattcataactctcctggggtgggacctttgctttggcatttatcccatgtgatgttttaatcatggactatccttccccatcatctgctattccataagctgcatctccagggagctctgagaattcaagcttatttgaatatcaacttaattaaagcatcattagatcataaagcaccatacatagacacacacattatgcacataaacatttgcaaaaatatcatggattttgaaactagccataaatgacttttggactgccagtggggacatgaggaaggaaatgaaaattgtacctactgtggtgggtcatatccgaatcatatgctgtgatgctggattatgaagtgccagccgcgatgccccagcagatcaattgggtctctgggacagtttctgcctgggtctgcctcagctgggaaatgtccagcagagcactgtgaataggcccccacaacctgcacatcagtgcctctggccccagaggagcttcccggcacctgggcatgtcagtgaccttatttcaggatagccccctaagtcttcaagccatttgcaactgcatgggtttacttgaaggccaaaaatctatttcctatgacatgtgaacagtcttaccaaaggtgcacacactggttaaaccctggatgagcaagtgtatttactcagcacttgctttgccttcatctgggctctccgaaagcagattcttaggctgggatttgagtgggagcaccagccaggtggtgaggagggaagctaatgtagggtgtggtacgctaccatggtatagcagtgtaggttactgctgtgagcagctgaggcgccatcccactggggacatctgggagatggtgtaggatgcatctagagctctccctccctagtggcaaggaagccaggacattgaaacatgaagtcttcttcacctttggctcagggttagtccagggacatcaacccccaggcattgcctgccctgccctatctgcaggctcagcagatcccttaaccaaaaaagtccccagtgtggagacctgcagttgctggtggtgagggtcaccagtatggcaacggtaggggccaagggaccctgatgtaggcagggacccaacagggtctgccataggtttccttctttccttccttcttttaagtgtaaggaactcctttgagagaagttggaggtatgtacacattttcccagtgaatggagccaatattgagacatctagaaaaagggaaatgaaagaagaggggagaaaaacacaggattcagctcagttttcctttactctggaaagtctccaagcccctcctctcactctctgaccagcgacctgatgtaagtgcacccccactcgacacccatagccctgaattgtaattgtctgttcatgtgtcatccttgcaaaccaaggcattctttcactcgtttgtctttatttctgtactctctgtacttacttgcttggcattgacaggtgcttaattaatctctagaaaatgaatgaaaggtggctttatttacattattccacatttatctctaccaaaattttaaagatttactcaggaacagaagttccaacctagttcctttggacctttgttggttgaattttagagatctttttgttgttgtcctaaaccaggtgccagatccctgcagagattttccaacatcaggattcttcctatagagaaaaaagacactccccatgaggagtctggagcccagtgaagtggaaagctgagatgctcaggctgaaaaccatccctgaaggttagaggtctagcagaaagcagtagctcattaaacattcatttttaatttttgcaaagacaaaagtagaaggccacattatcatttatcattccctgaagaggaggtaaaagtatatgacagagcaaaacctggtcaccacttctgaccaagcctttcctcttccagtatctatgatttgggcttaatgatggttttctttagtacaagatctctactctgctctagataatctgatgacacggtgatgacctttgcctccatctctccttcaagacattccacttttctggtacccagagctgaccccttcctcggatggtacctacactggattttcctactggatggccaagatcagagttgttcaaggtaagactttcctgggctgtgacatgcccaggggaccccgcagatccctgtgggaggctctgggaatctttcccattatgggcaaatgagagaactcattcatccactccagagtttttcaacctacgtgctattggcattttggatgggaatattctctgttgtgtggggctgtcctgtgccatgtaggatgtttagcaatttccctggcccctacccaccagataatagcatcaccccttccaaacaaaatgactgtctccagatattgccacatgccctgtggggtgaaagattacccttggttgagacccattgctctagcccaagcctgatgacaattagtaagatattggctcaaaggctgcatttctggggtctcttggaatctccttgatcttgcggcaggagtctctagggttaatacatttaccgtcactgctatcttccgaacacctattatatggcaaacattgttttggcccttgagatagagctgttatgtgtagtaaatgaccctctttattccgatgaggaaatggaagcccagaaagactctcagccaaggtattccaacaacacatgccttgcaaatggtgggactaggatttaaattggggtcttttgacttcaaagcctgttctccttctactcccgttctcccctatcttaatatacacagtccatcccctctgaggaactggctagagaaagtaattcagtagatagtatatgtttcccaaaacggccacctttgtgacacccaagttctgaaatattagaaataataccttctagaacacacacactttgagtattgactcacttaccaaaatccctcaagagtattctctctgtgctgtggccctgaggaaagaggagtgagcaagaattcctgtgctggaggagctgttccgccaatggaacatgtgggcctgagaagcttcatttgcaatacattatggaatatgcactatttagaagaggcctacaaaggcattggagtatgaggttgtttgatctcacagtataggggtcctttgtgccaaatatggcctgttgcctactttgtaaggtacaaaccatgacccgtgggccaaatctagcctgcagcccatttttgtaaggcatatgagttaaggacggttcttatacttgtaaagttttgtttaaaaaacaacaacaacaaacaaaggagaataggtgacggaagctatatgtggatcacaaagcctaaaatatttacgatctggctctttgccaaatccacacttagaatgaaagtaagtatctttgcagcaattagtaggtgtgtacttagaagataggttaggcacagtggctcaggcctgcaatcccagcactttgggaggctgaggcaggcagatcactcaggagttaaagaccccgggcaacatggtgaaacttcatttctacaaaaaaatacaaaaattagtcaggcatagtggcacacccctgtggtcccagctactcaggaggctgaggtgggagggtcacttgaacctggcaggtagacattccagtgaatcacagtcacgccactgcactccagcctgggggacaaagcaagaacctatcgaaaaaaataataataattttttatcctaggttcacacaataaaagcaataaaaggatcagtgaggatgggatgagttgtcattgtttcttctttggaggaatcctacattgatgatcacttcacaaagagatcatgttaaacactacattctatgagtctttcactgttcagagcatggaaaatgtgtggcatgtcataaaagttaaggcaattcgaagtgttaacaaatccaaaatttctaaggcttaagacaagagaagtttatttcttgtccagtcactaattggttatgagagcaggagtgctctgcttcacacataacattcaggaacctgggctgagaaaggctcttctgtactcaacgtgtaacttcccaagtcatcctagatgtcagcaacctgcaggaagacataggaagagagcgaatggtgagttttcaatgggagctttttatgggccaggcctggaaaggatgttcctcacttccactcctatgttatcggccagaactcagtctcatggccacaccgaactgaaagggaggcagtgtagctgtgggcccaggaagaaggggaaatgggttctggtgaacacaaagcagtctttgccaccagaagaaaccttggataaaactggaaactggttgctttgtagtgacaaagagatttgagttagtaagaggagagctagcatttgaatgtcatattcagagcagataaaaacccgattgttgggaggggggttaagacggctgactaaaggttctggtactcatcacttccacaaagaagaaccaaaattgcaagtagataatcacactttgaatagatcatctaagagataaaactggaattcaacagaaaagtgtcaggaaacatctaaggcaaggaaagaggggctaaaaaaaaaaaaaaaaaaaaaggaaggagaaggaagccaggcagcttgctcagctgggatcagctgggaaccagaagaggcttctcaatgcaggtaaaaggtaagtaagtgatccccaacacccaacactccacattcccactctgagctcctgcattccgagccatggaagagcccctcgactctcccatgccctgagacaaacctagagagctgcctggaaactgcacagtggcattgcgccagagatggagctcacattgggccccctgcacacctcaagtcctaagcagcttcagcatggtgccattttgagagctcagccactgccaaactgcatcctgccttggggctcaacagccccttcatcttcacatccctggagccccattgacatcccataggtagctgccatcattgctggctgcctccattggggtcattgcatgaccactcacagtagcgagactgctacacataggcaagtgctctacagacaggctgttccacccaaagccaccacctggggctgaagttcatgcatcccagctgcctgcctgtggctgctgccactgaaaacaaccctgccctctccagcagtggggatgccacacagtcactgccacccccacctgaacattccactaggggcctggggatcaccccaccccttcctactacaaccaacacctgcatgtatcactgggaggcctgaagagataactttactgtgtatagtatccttatctggcaggtttgttttcagcactttgaatatatcatcccatgctctcctggcatttaaggtttcttctgagaaatccactgttagtctgatgggggttcacttgtaagtgactagatgcttttctcttgctgtttttagcattttctgtttgtctttgaattttcacattttgactacaatatgccatggagaagatcttttaaaattgcatctgtttagggatctctgagcttcctgtatttggacagcaaaaatgcaaatatttgattgccagaaagaaagaaaaaaaccaaaagaatataaagcttatttaatgaaacaacagctgaaaacttcccaagtctactaagacatttagacatccaaatacaaagttatacttcataagtgaaggggaaatgaagtctttcccaggtaaacaaaagctgagggaattcaccgccactagattaatcccacaagaaatgcctaagggagtcctattcctgggagtgaaaggacgatatctactaccataaaaacacacaaaagcgttaatataaaacccactggtagagcaaacacacaagtaaggaatagaaaggatgcaaatgttataaccacagaaaactaccaagtgacaatgataaaacgtaagagagaaagaaaggatatacaaaacaaccagaaatcaattaataaaatgataaaaataaaccctgacatatcaataataactttgaatgtaagtgaattaaattttccatttaaaagatatagaatggctaagtgaaattttttaaatgacctaactatatgctgcctacaaagaaacatgtctcacctgtaaagacatatatagactgaaagtaaagagatggaaaagtatattccgtgcaaatggaaaccaaaagagagcaggagtagctacctttatatcagttaaaacagactttaaggcaaaaacagtaaaaagagtaaaagaaggttattatatgataaagggatcaattcagcaagaggatgtaacaattctaaacatacatgcatgcagcatcagagcactgaggtatacaaagcaaatattattagatctaaagggagagatggaattcaatataaaaatagttgaagagttcaataccacactctcagtattaggcaaatcatttagacagaaactttggatttaaactgcactttagaccaaatggacctgacatatatttacagaacatttcatccaatagctacagaatatacattattcttatcagcacatgaaacattctccaggatagaccatatgttagcacacaagaaaagtctcaacaaatttttaaaaattgatatcaaattaaatatcttctcagactacaatggaataaaactagaaattaataacaagaggaactttggaaactgtacaaatacatggaaattaaacaacatgctcctgaatgaccaatgggtcaaagaagaaattgagaggaaaataaaaaagattactggaacagatgaaaatagaaacatgacataccaaaacctatcagatacaacaaacgcattgtgaagacaggattcacagcaataaactcctacatttaaaaagtagaaagatttcaaataaacaatttaatgatgcacctgaaataactagaaaagcaagaacaaaccaaacccaaaattaatagcaggacaaaaataatacagatcagagcagaactaaacaaaatagagactaaaatacaatatcaaaaatcagttaaatgaagagttagttttttgaaaagataaacaagatcaataaactcctaactagattaatcagaaaaaagagagaagacccaaataaaccaaactagaaacaaaaaagaagacattacaagtgataccacagaaatacaaaagatcatcaaacgttgttataaacaactatacactaacaaactggaaaatttagaggaaatggatctatttctggacacatacagcctaccaagattgaatcaggaaagaataaaaagcctgaacagaccaataatgagtagaaaaattgaatcagtaataaaaattcttccaaaaaaacaaaagctcaggaccagataaattcactgctgaattctaccaaacttacaaagaactgataccaattctcctcaaactgttacaaaaaaattaaaaaagaagggattctccctatctcaatctataatgccagcaccaccctgatacaaaaccagaccaggatgtgacaaaaaagaaaactacaggccaatatccctgatgaacatagagacaaaaatcctcaacaaattactagcaaacaaaatgcaacagcatatcaaaaagacaatacaccatgatcaagtgggatttatcccaggttgcaaggatggctcaacatatgcaaatcaataaatgtgatacattacatcaacagatgaaggacaaaatccacatgatcatctcaacagacacagaaaacaacatttattaacatccaatataacttcattaaaatctttcaataaactaggcatagaaggagcatatctcaacataacagctatatatgacaaacccacagctaacatggggaaaaactaaaagattttcttctaagaactgaaaagagacaagaacgcctactttcactactcctattcaacacaatattggaagtcctagccaaagaaatcaggcaagaaagaaaaatacaaggcatccaaatttgaaaagaggaagtaaattgtccctctttgctgatgatacgattttatatctagaaaaccaaaaagctcttagaggtaataaataaattcagcaaagttgcagaatacaaaatcaacaaacaaaaatcagtagtgtttctatacccccataatgaattagatgaaaaagatatcaggaaggtaattctatctacaatagctacagaaaaaactaactaaaagcctaggaataaatttaactagttaagtgaaatatttctacaaggaaaactgcaaaacactaatgaaagaaattaaagagaacacaaacaaatagaaagacatcccatgttcttgggttggaataattaatatcattaaaatgaccatactacccaaacacatctacagattcaatgcagtctctatcaaaataccattgtcatttttcacaaaaatagaaaaaaaatcctaaaacttctatggaaccaaaaaagagaccaaatagacaaaacaatcttgagtaaaaagaataaagctgaaggcatcataccacctaacttcaaaatatgttacaagactatagtaaccaaaacagcatgatattgatatcaaaacagacacatggaccagcagaaaagagtaaagaaccagaaataaattgatgtatttgcagccaattgactttcaacaaaggcaccaaggacatacattggagaaaggacactctattcaataaatattgctggaaaaactggatagccacatgctgaagaatgaaactagatctctgtctctcaccatagatacaaaaaaataaactcaagatgaattagacttaaatgtaagacttaaaactataaaactgctagatgagtacttgggggaaacactttaagacatcggtctaggcaaagattttatggctaagacttcaaaagcacagacaacagaaccaaaaatagacaaaaaggactatattaaactaaaaagtttctgcacagcaaaggaaacaataaacagagtgaagagacaacctataaaatgggagaaaatatttgcaaattataaatcaaacaagggactaatatccagaatatacaagaaatgcaaacaactcaacagaaaataaacaaataaactcataaaaagtggccaaatgacatgaatagacatttcttaaaagaaaacattaaataaccaacaggtatatttttaaatgctcaacatcactaatcattagggaaatgcaaatcaaacaataatgagatattatcttactccagttagaatggctattattaaaaagacaaaaatgaacagttgttggtgagaaagtaaagaaaaggaaattcttatacactattggtaaatgtaaatcagtacagccactatgaaaagcagtatggaaatttctcaaaaaactaaaaatagaactacgtgatccagcaacctcactactggatatttatccaaaggaaaggaaatgagtatatcaaagggatagctacaccccatgtttttggcagcactattcacaacagcaaagttatggaatcaacctaagtgtccatcagtggacaaatggataaagaaaatgtggtatatatatgcaatggaatactatttggcaataaaaaagaataaaatcatgtcatttgcagcaacatggatgtaactagaggtcgttatcttaagtgaaataagccagaaagacaaatattgcatattgtcacttatatatgggagcttaaaaggttaatctcatgaatgtagacagtagaatgatagctactgaggtaggaggcagaaatgactcccaaggcagggctaaggcaccagaccaaattgaggactagctaaaacaggtctgtggcaaaagcagctttctgtaagacatatacactagtatgtcatgtcagtttaccattgccatggcaacacctggtagttactgcccctctccatggtgacaacccagaaattactatcctcattctagaaatttctgcataaactgccccttaatttgcatatattaaagtgggtatagatatgagtgcagaactgcctctgagctgccattctgggcatactgcctctggggtagccctgctttgcaaggagcagtacctctgcttctgctgtacactgctgcttcaataaaagttgctgtctgacaccaccagcttgcccttgaattctttcctgggcaaagccgagaaccctccctggctaagccccagttttgggggtttgcctatcttgcatcaataccagtgactgggaaacctttgtgggtgtgaaggggggataaggagaggttggctaaagcataccaacatacagttagatagaaggaataagttctaatgtttgataacagagcagggtgactatagttaacaataatgtatatatcaaaatatctaaaagagaggacttgaaatattcccaagacataaaaatgataaatactcaagtgatggacaccttaaataccttgagttgatcattacacattctatgcatgtaagaaaataacacgtgtactccatatatatgcacaaatattatgtatcagtaaaaaacttgattatattctcatacagaattgcctacctatccgtgatgtggaaaatgcactgaaattgaaggacaaaataaagcccatcagctctggagccagggataagtcacagcctctggacaccaagggcctcatccatcagataaagaagttggagcttcaggggtctgtgagttcacatacagcatccaagaacatggagggacagcaataggcccagaaagagacccctcacgtgactaccacggtctcatcacaagtgattttgatcattgtcagacatcctgtgcctttccacagaataaagcacaggctgtgttgagaagaacagaggggaattgggcctttgatcctcttgtaatctgtgtgagaaagatcatggaacacctctgtgacattcaacaatactcatgccaggtaagcaaagatgaatgacgtgcatagttcacttggaggggagacagagaggtaaatgtatttaatttcactgtgataggggttatgaaggtgttacgcatggaaactgactggaggtggctgtgcagagaagagaggctcaggagggtttcccagagaaggggacaactgggctcaattgtgactacattagctaagtgaggtgtgcattgagaggaggggaaagaaagtcaggggagggtgctctaggaaagagtacagcacgaataaaggcttgcagcacagaagagctacagggagtgtggtgttgctgacagataaatcgagaagtggggagctggagaagtagacaaggtcctaaagggcctcgccactcacattaaaggactcgtgttttatttaataggcaatgagaagtcaatgaattgatgattttttgggagaaacagagtacactttggataaattattctccccttttatgttaaaacagttccagaattgttatctcaggaaacacattttcttacattttcaaactgtaaaactcacacatgtgcattgtagaaacgttggaaaatatacaaaggcataatcgataagaaaaaattatacatcaacttatcaaatggagaccattactagcaacattttgggatatattcctccagtcctttttatgttcatatttaaaaatagttgaagttacaaggtctatggtactttaaaaaagtttttatataaaaataaatactatatacatttcccatttttctgaaaatgtagccaataagaagcttcctgcctggtctccttcctgctgctctccccaccccagtctattctcaacacagaagccaaagtaattctactcaaatgttcagaaaagtatgaatagcaataagaaaaaaagttaatatacacacccaccacccagagtcccactgttaacattgtggggtaattttttcctggtcttatttttcctgagaattaaaaaaataccttaggtgatatggaataaaggtttttgtttttcattgtcttttagcataaggccaacttttaacaggaagtcaattatacaaacaaatatttacaaaatatttcctaaagcacatgccaatcatacaatcatataatctacagcccctgacctcagatcaagagagaccacaggagagcagcagaattggtctgaattgcttaaatctattttgaaattgtattttgaattgtattttactgttatgtattaagcttgagttaagagatagcatttttcatacatttgctgtcatatttgctttagggatgttattgaggtcttgtccattacatcagacaatgcctccattaagggatctcaagagacacatttttctcatatcttattgctaaaaaatgttctgcttctactttatcagagagtgtgagttttaaaaatcttattggcaatgaaaactaggtaactcaactcatcttctttttattgtccactaggaaattagagcataagtgagaggttcctttgccaccatgtcgcactttacgtcacacatatttgtgtcctacatttttatctggccttttcttattctatccttattttctctttctcctgacttcctgacatatacactcccccttcatgtatgtgtatgtgtgtatctacagctatatatatgtgtgtgtataattatgtgtatatatgcataagtgtgtatatatacacatatagtttaagcaatacagaccatagctatacatatatctacatacacacatatgcatatatatctatccacatttacaaatatagagagaacatttatatgcatatatttctacagtgctctcttatggtatagtaatttttatcacatttttggaatgagaaatcacctattgtgtaggtgatttgggcagggagaccagttagaaacagtggcaatgggacaggcaatgccaccctgggctaggaccacgggtattcatgtggggagaaggaaatggaaccaagaaatatttataaggcagatacatctcaaattaatgctggattagttgtgatggaaagaaaagtgacttccaggtttcaagcctaggctgtaggttttccaactggggcagggagtagtttgggaggaaatatgagacctccatttttgggcatgctgatttgaaggaaactgtctaggacagccaggtggagatacccaagctttgcctaccactccattagtttccactgatgctcattcacttccattatttttttctgcttggagtatagccaccttagcttctagcactgaccaaacttgagtcatctttctgggcccagttgaggtcctacacttccaagaggccttgtagcccacttttcttctgacctccaacagcacttgctatctgcattatctttagagcaaagacttgaagccctttatgttgctatctacttgttttatctcataggtgaaattcacctacttattcattcagtgaatatttagtgtaagcatccacacgttctgtgctaggtgatgggcacacagatgactcagacatggtctcggctcttaaagagttgactatccactggaagaggagatgatgcaacatgagcaagttactctgtgcccttgaaggaacacaaggttcgttctcttctttattgtttactctcatggtggcttgctcaggctgcatgcagagccaagcctcaacgaacagcatatcaattctatccattctagcttccagactatccattctagcttccagaagagaaattccatagcaaaccctgggggatgaaatctgatctctctctgagccatccaaattcactttatacacagtgtgagtcgtgacagtgtataatgcctgtccctaaaatgtggctttcgtctgtgtggccatgtttctcctgctgtgctcacaccccaaaagaggcaaaatcttataagaagctccaatatagtggcaatgttttgcttttctagagtggacttgatttttcacagcagttatgaggcatctcagtcatggcaggcaaagacccttttcactcagaaacataaggcatgagaaggaacttgacagcattgtggaaagcagtgagctgtcagtcggaaaggataatcagttaccttctgggatctgccctcaactaactgctttgacttgggtaagccagtaaactgctccctgctttggggccctaattcatgaaagaagatggctacagaaatgggattccaatactgtttatgttctccttttgttttttttcatgtgattttctttgtaaatgtctataattagttttccagaatgacagttaatctgaatgagttggcttctgctccagttgtcaatgggaagacatagaaactatcagttttagaagttaggcaatatttgaatatgttgtcttaaagacacttttttcaacacatgagaatgatttattgagaaggagttaagatgtgactgagttgggtgacaactttgggttgttgccccagagctcaagggtgtgcctgtgagagtcctcaactggcatgatggagaaagctttggctgtcagatggaagacatcagtcttggccctagaacttgctactgatgagactcaggacaaggtctgagactctctagactccagtctctttccttacaaaataatgcttgatctagattcttttcaatcttctctccagctctagcagtcgactatctcttgtaaactatgtatgtaagagtggttatgtgtgtgatttgtgagcaacactttgtttaaagttgcaagctctcttagttttcacaataataacaatgtctgacagtttctcattctgcaaacaacagcttcttggtttgtttagtgcaacacagaattgtgaaaagctcacaggctttgaaagcagagatacccaggcccaagtctaccactgactgtcacgtcttaactgtgtggttcttagcatgtcacttttaatgtcaaagtcttatttacctcctccataaattggacattctcatatcatgggtgtgtgttcttttttgttgtgataagtgattggcacaggtttgtcacatggtgacatgtttaataagtagtaggttttataatgttttcaggcttaataaaggcatttggtttattaatcaaagattaatgaacaatgctgtcactttttggtttattctacaacaaaaataagctaacaacttttctttctttctttctcttctttctctttctttttttttttttttttttttttgttaagcagggtctcactctgtcacccaggctagactgcagtggtgcaatcctagctcattgcaaccttgaactcctacggtcaaatgagcctcccacctcagccttctgagtagctaggactacaagtgtgtactactatgccaggctaatttaaaaaaaattgtagagatgacatcttgctatattgcccaggctggtctaaaactcatggcctgaagggatcctctcacctcagcctccccaaatgtggggattacaggcatgagccaccatccccagtgagtaacaacttcttggtgttggagaaaaacaaatacacaaactctgtgggctcactttcttcatttataaaattaaggatgccccagatgattcctaaggcctctctataattttttgtctggctcataaactggatctggatataattccaaagtaattcaagtaaatacattccagaatggggttttaagtaataacagcatcattgcaataaatttaagcatgattactttagaggacaatactcttttagatgtgtgattcaagtcaggttattttaatattaataatatgtatttaatgcctaccttgctacagtccagcaagtgtttttgttacattttgtagccacaccttagacctgtgggaagaacaggaaagaacagcaggaagagatggagacaatatgaggtagaaggtcaggataaaagcaaggtgacctggcaaggctggctctgtcttccccctggttggacaatgacttgcttgcattgtgtgccttactttactcaataaatatattcctgaaagtagcttcaaaacatttgcagattgaatcatgttttcggtgtaacacaggcatgttctattgaaaccactcccatggtaaaactttttgtaaaaagagacattattctctaattctaaatctacattggattttcttaaaggaaagttcaactgtaattattttcctggagaggaaaagtgatgtcaagccaccctgatgagagcctggtgtgggaacagcttgtctggcctcttgggatctctggggaaagtagacggagatgaggaatagacacgtattccagaactggacttcgaatgggcctttggccaaacttggcccaatttctcaacagagagaaagcactgacccaagctgaagactgattcacagccaacctgctttggacacgttgtcctctgccaggcaagccagcgccctatccctgaggcacttgctggccaggggaaggaaatgctgggagaggaagccttgctctttccccctttgctgcatagttccagcttttgtgcagctctcatgtttggggataggggaggaagggagaagactgggaagtgggaggagggggacaaggccacccatgaagatgcagggaaagccagcaaaggccaggagggagtcattgcagaagaagagaataatgtgaatgaacttggggacaaaggggaaataaggaaggggttcagggaaacctcacaaactagatggaaaagaaagaggaaggggaaattcccaggatagaaagtaaaccaggaagagacgaagaggagggcttctccaggtgtgacccacaccccaaattcaaacattcttgatttagaaaaatgtcctgtgattcattctccaatgggaagtccactgtgtagaaattttctttaacaatttcttcttgacatgctcctggaattataaggaatttgggcatgagagctccttttccaaaaagattcatgagaggacttcttcctcggtgctgactgcatttggaagagcagttgaattaggaatggcttgcaaaaatgttagtagggatggaagagagtgttggagacgaggagtgattaatattcaaaattcaggtttgtgttcaattttgaagtcactgttttagttttgatatcaatgtaaggagtgtaagacctgtgtaaatgggatatcaggttaaaaaatccagcctgctccatcctgaggagagcacaaatacatgggactcacagataattcaaatgttgacttcactactccagctgtcaaagcagttctgagcgagaacaagactgtttgtaggaactctagttcttttgcattacctgtcttcctggaggtagaatcatcaggaagaagaaaccaagaggagcagaatcagatgggtgaagtaacccgtgcattatgtaaacaatctttggcccataacctagggtgagccaacatattaatatttaactactaactcacaggatcaaccaatcagatttggccctggacatagccccaatcagccctggagataacattcccatggcaacactaatgcattcttcactgaatggttggcaacactaatgcacttactcatttaagattctttgtttaatgtatgtcttcccctccagactgtaagcctattgaagggtttccctagcatgttgtgggtgctcaataaataactattgtctgacggcaaataccacacccctgagccatatggaagacatctcccctcatggtgttgtggctaattcagaagtggcatagagtcatgaaaaagtgcttcacatcaggacagcagctcagctcctgacctggttctgcttttctctcactgtgtgactttggacaagtcatctcctctccctctacctctgactcctttgctatgaaatgacaggattggatttgatgatctctgaggccgatttcagctctaatactcagtggttcagcacacccataaagtgcacagcagaggtttgtttgtgaccaaaacagaatgttaggaactgaaaaaactgccaaagaccactttagaggaaaagtggaaacaaggttttgtgtgaaatatgcttggcttgcacaatgcaagtgattcttttgtgagagcggaaggccatagggtgtgattactttatctgccactaagcttcctgggcagcccaggccaagctaaagatacctatcactcttgttcaaggtccgtttcctactgagttgtcacactgttgaattattgttgagttgaagtccaaaaggggaaatattttgcaatctagagttggaccctggagctatacaactatgattactgatacagattttcccagaaaatctcagtgcaccgaggtcataccaaggagccctcatacttctgtatgctactgtcagcttactctgctggtggtgctgaagttccgtgaacattttccccaatgagcaagtaaaaacatttcattttgcctcttcctgaaccatttttttaaaagtttttatatggaataaatctttacattaaaaaagatacacaatagcatttacttttaaaaataaaatttaaaatatgatgtgtatatttaaggtatacaacattatgttatgggatacatatagatagtaaaaaggttactataataaaacaaatatattcagcatctcacagagttatccccattgccctgcccctttgtttggtaagagcagctaaaatctactcatttaacaggactcctaaatgcataaaattttattaattacagtcctcctgtacattagagctctaggcttattcattctaatatatgctacttgataacctctgacctacatcttcccatttgttccccttttccctaacccctggtaactactgttttattctctgtgtttgtatatttgactttaattttggtttagattctacatacaagtgatatcataaaatgtttttctttctatgcctggcttacttcatctagtgtaatatcctccagttccatccaagttgtggcaaatggcaggatttccttttttaaggctgaataacattctattggatggatagctagatgatgatagatagatagatagatagatagatagatagatagatagataaagagtgtcctgtgtactgagtcagaggacacatatatctgtttctttatccatttgtccattgatggacacttaggttgttcccatatcttgactattgtgaataatgctgcaacaaacatgggtgtgcagatatctttatgaggtggtgatttcatctccttgggtatataatcagaagagggattactatgttaaatggtcattctatttttaatcaatttttttgagacagggtttcacttcattgctcaggctggagtgcagtggcatgatcatggctactgtagcctcaacctcccatgctcaagtcatcctcccacctcagcctcccaagtagctaagactacagacatgtgccaccatgctgggctaattttttagttttttgtagagatgtgaactcaccatgtggcttaggtttttcttaatttgtctaggaacctccatattgttttccataatgcttgcgccaatctacatttccaccaacaatgtacaatttttcccttttctccacacccttgctgacattttttatctcttgacttttatgattatcatcctaatggacatgaggtgaaataagcttttaaaaaaacctttttttatgtagctctgtttaaaaagcactttaggaagaaggacatatttgtctgcacaaaaagagtatcctgtgtactgagtcaaaggatgacaagcccatagctccttgaatcttaacacagatgctactatgactattagcttttaaactcctgccatcctcagagagcctatgatagtgatgaagaaagaattatataacatgacgggttcaaagatcccaggacaggtatcaaaaccccagcttccaaaccagttgcgtgtattcctctgagcaaatcccggcctctctgagccactgttgactcccatgtgaaccgttcatccaggtgcccagaagctctgcgttctgtggagccttagaagtccaggtgggaggcaggtggaaagagagaaggaccaagagacagacgggggttccgtgtccctggagccagagctctacttttgtcttttatacgtgtccgaggtctgctaaaatgtcactgaagaaaagattatgctgtctataaagagtttgaaagcacaggattagatgacccctaaagacactcttagttctttaaaaaaaaaaaaaaaagtcctctgggttcatgttcacataaactcacaagcttaggtacacacacacaaacacacactctcatgcttacacacaccctccactataaaaacaaacaagattgattaacatttcatgaatcgtgctgaaaagttaattcagatgtccttctctctgaatgctctgctgtcctctgcaggtccccaggtcctgctgggagttggggaagcactgcatgtgaccaagtcttcagctgaaaatcaaatcagttagagctaagtgaagcttagagctcatctgtcccctgcttaactgtatatatgatgaatgcaaggcctggaaaggggagtgacttacccaaggttatataactagctggtggcagagccaccattaggggtcacttctccgaatcccagcccagtgtccttcccaccatactatgctcttgaaaaatgatggaactacatggaatgactgaatattctgtattgatagactctaaaataaaaatatttcccacccatctctgtggtatgggtagatctttagagctattaagaccctcccctaccaaaaaaataccatacacacacacacatacacacacacacacacacacacacatacacacacacaggcactttgccaaggggataaggggtaatgaaaaacccttggcaagtggatacttcaaagctttagagagtttatctgaagaagactttgaatagagtgcaatgttttatgagttttcctaatccctcagtaaatgtgccttgctgaataagcagaaacatttttaatgactgttaaagagttatagacacaggcctgtgactgggtattagagtagggtttcctaggacctttagtctcctgcactccaggactggaagtagaatttatatctgtgccactggttctgagctaataaatttagagcccaaggctctttcttctgaaggttggtggccacttactgtttactcagtgctagcaactgctacttctaccaccactaattatctctacctctattgccaccactaaaaatgtccttttagctcattttagcctcacaatatcccagagaggtgtgtcatatgagtttagaatcccttcttcaggtaggaagagaatagtgtgccagcaattgagatgggctcagtacactttgttgagcttgagccaggaaaggggactgagtttcaggaagtccaggggagccaggtcatagtgtaagagatgagaggcctagagaaagaaaaggccaactgccctcatggttgaaagtcctgagaagaagactgaggtcaggacacacgctagacagctacggggctgtcagggcatcaaagccaggaagacagatgctgccttggagctggaggctctcccagctctgctctgcactatccctgcctctcctgcttctggggcctctgggtaattccatttcaggcagcagcttcagttgggttggaattttaagaatttgtccagtaatttgcagcttactatccgggggtggaatgagtaaaatggggcattttcagggcagattttagagtcgaggctataaacccaagagctgtggcttcctggggtctctttcaggactcacactgcatcccttaaacttaccctctcttttgcagtagccccaagtggaggggttcatttcatctcctaggtcttacacccctcttgataattaaaactcatttttaggagatgggagatttaattgttactttaacactgtgtagatttgtgtgacataaaggcaagtctagcatggcttaacaaaacccgccaaaaaaccaggataagaaaaggcactgaacacacagagtgaagtgaacccaaattgctatggtctctaccttctgcatcaaggaagacaaaacaggaattgggaagagtcaaggtcaggatgggcatggactctcccaaggataaatatgtcaagaagagttgaatgacaaaatcaaaattcagaaaagggaaaaacacatttttcaaaataacaagtttccaaagctattcatgtaggatatctgatttttttttgagtggacatttaaaacaaaaatcagaaaaatgacaacatatttctacccagactaaaaatgttctcgtgtcgtttcagacttcttccatcctcaggactggtaaatctttgtaccctaaaatgggttggaaggaaaaaagcaatgactcatatcccatgctgaaagcttgatgattttcaagacaagaaaaggctgtgggaaggctcagagcccaggaacaaaaggcagacaaatattttgggagtgagaggagaagcagggactgctggagggaaaagagaaaagagagtattaagaagaagagaagggaatccacatagaacactttttattagtcaaggaggattttcacaaagattcccttaaagacaagtaaggccctacacttgcaaataagacaagaataatgagctaatctgagagactacattcaactttccacccctcagtacaactctgtaaagtctaacatttaagaaaacttcttaaaagttctgaatatgtgtctcctagaaccaatcacccatattatgatgactaagttacgcctaagatattttaagtatggatcttggagacaccctggaaaggtatctgttttgtcaagagaagaatccagagggttttcgtagaagtgctttagtgaagtaaacacattgagaatatgctccaaggtcacctacttgttctgcagagttatttagctctactgggggcttcaaggtggaaacattgatattacatcaattgtattaggtagacatcgttctgtgacaaattttaaaatgtgacccaactctatgctgtgtacaagaaactcattttaaatataatgacataggcaggttaaaagtaaaagaatggaataagatgtattatgcaaacactaatcaaaggaaagcaaaagtggctatgtattttttcctctcttctttctttttaattttactttaagttctgggatacatgtgcagaacatacaggtttgttacataggtatacatgtgccatagtggtttgctgcacccatcaacccatcatctatgttttcagccccgcatgcattaggtatttgtcctaatggtctccctccccttgacccccaccccttgacaagccctggtgtgtgatgttcccctccctgtgtccatgtgttctcattgttcaactcccacttatgagtgagatcatgcagtgtttggttttctgttcctgtgttagtttgctgagaatgatggctcccagtttcatccatcctgcaaaggacatggactcattcttttttatggctgcatagtattccatgatgtatatgtgaaaagtgtctatattaatatcacataaaataaacttcagaacaaagaaaattatcatagatatagagggacattatataatgaaaaaagggccaatccacaaagaagacatagcaatctagaatgtgtgtgcactaaacaaaagagccacaaaaatagatgaagcaaaacccaaaagaacagaaagaggaaataagcaaatccacaattataaatgaagacttgactacctctcttaacaattgatagaacaactagacagaaaatcagcaaggatatagaagaagtcaacaccataacaaataggatctaattgatatttatagattaccaccaaacagcagaagaatacacattcttttcaagtccctacctaacaatatcaagatagaccacattttaggcataaaacaaaacccaacacatttaaaagagttgaaattattaagagtgtgttctctgattacaatggaattgagctagaaattaaaaacagaagcgtaacaggaaaatctccaacacttgggaattaaacaacccacttataaataatccatgggtcaaagagaaagttgcaaagaaactttaaaaatacattcaactgaataaaaatgaaaatataatgtggcaaaatgtgtggagcacggctaaaacagtgatgagagtaaactttatagcactaaatacatatattagaaaagaagaaaggtcccaaattaatcatctatgcccctgtctcaaaacctagaaaaataagaggaaataaactcaaagcaagcagaaggaagaacataataaagatataagcagaaatctatgaaatcagaaaaaagatagagaaaatcaacaaagccaaagcctggttctttgaaaagattaatataattgacaaatctctaacatgattgagaaagaaaaaagattaaaatacaaattaccaatatcaagagtgaaacaaaggatatcaatataggccctgcagacatcaaagattaataatggatattacaaacaattctacacacataaatttaacaacttagacaaaatggaccactttctcaaagaacacaaactaccaatgcacccagtatggaacatacataatttgaatagaactacaactactaagaaattgaattcataatttataaacctccaagaaataatctccatctccagatggtttcactggaaaattttactaaatgtttaaagtagaatgaacaccaattatgcacaatcttttctataaaatagaagacaaaagaatactttcaattcattctatatagatacaattaccctgaattttttaaaagtaagtttaaagaaagaaagaaagaaaaagaaaattacagaccaatatccctcaagaatatagttgcaaaaatctacttcaatagaattcagcaatatataaaacatcatacatacacacacatttataattataaaccatgagcaaatggagtttacgctgggatgcacaaataatttagcatttgaacatcaaaatctgtcagtgtaaatcactatgttaacaggctaaattaaaaccagcatgataatgtcaatcttgcagaaaaagcatttgacaaagttcagtgttcatttatcataaaaacactaaaaccctacttatcataaaaacatagccacttgttcaatctcataaagagcttctacaaaaagacctacagctaacattatactaatgttgaaagactaaattttcccctaaaattggaaataaggcaagcatatccactctcatcactcttattcaacacgttgctggaagttgtagccagtgcaataaggcaagaagaagaaataaaaagcatgtagattggaaaggaagaaatataagtatctctgtttgcagatgacattattgtctaagtggaaaatcccaaggaacctaccatctattaggacctcttggacctaataagtgaactcagcaaattcacaggatacaagataaacatacaaaattcaattgtattttgatatactatcaatgagcacatggacagtaaaattaaaatacaatgccatttatgattcctccaaataaaatatttaggtataaatctaatgaaacatctacaggacttatatactgaaactacacaatgccgatgaaagaaatcaaatatctaaataaatgaaggggcaggatgtcaattttctttaaattgatatataggtttaatgcacttcatatcaaaatcccagcaagactttttatagaaatagacaagagtacttgaatatttacatagaaaagcctataatctatttcaagagttattatatagtcatagcaatcaggactgcatggtatctttgaagagataatgacatatatcaatggaacaaaacagagaaccccaagatagacccctgcgaatatgcccaagtgattttttcagaaaagtgcagaagcaattcaatggaggaaagatttttattcaacaaatggcactggagccattggatatccacaagcaaaaagaaataaatgaacctctgctgggcgcaatggctatacctgtaatcccagcattttgggaggccaaatcagatgaattacttgaggccaggagtttgagaccagcctggtcaacatggcaaaaccacgtctctactaaaaatacaaaaattagccaggctaatttaaaaattacaggtggtgcacacctgtaatcccagctactctgaaggctgaggcacaagaatctcttgaatctgggaggcggatgttacagtgagctaatatcgcaccattgcactccagctggcccacagagcaagactctgtctcaaaataaaaataaataccttcatctcatgtagtaattcatacaaagtagatcacagatttaaatcaaaacataaatctataaaattcaggaagaaaaaacaaaagaaaaattctaagcagagtgcttacacttaacaccacacacatgatccatacaaggaaaaattgataaactgaatctcatcaaaattaaacggttgctctgcaagctatggaccggagaaaatatttgcaaaccacataaatgacaaagggctagtatctagaaaatacaaaagattctcaaacacagcaattaaaaaaatcaaacaatccaattggaaaacgggataaaagataggaagagacactacaccagagagtgtacacagatggcaaataagaatatgaaaaagatgtccaaaatcattagctattagggacgcaaattaaaaccataatgaggtgccactacccacctatcagaaaaacaaacatttaaaaatagtgaaacattaaatgctggtaagaatgcagagaatggagatctctcatgctttcctggcaggaatataaaatggtacagtcactctggaaaatagtttggtagtttctttaaaaactaaacatgtaacctagcagttgtactcctgagcatttatcccagagaaacaaagacttatgtttacacaaaaacctgttgatagcagctttatttgtattagccaaaaactggaaacaacccagatatttgtcaatggatgaatggttaaacaaactgtggtacattcataccatggaagtgtctcagtaataaaaggaacaagctattgatatatgcaacaatctggacaaatctctagagaatgatgctaagtgagaaaagccaatccctaaagattacatacattattatttcacttatacaacattctttaaatgacaaaattatagaaacagagaacagattagaggtttccaggggttaaggagtggacgggtacagaagacaagttaatatgggcaatcagagggaggcttatggtgatgttctataactcgactacatcaacatcaatgtcttggttgtgatactatgctatagctttgcaagaagttaccattggaaatggtacatgagctctctctgtattatttctttcagctatatatgaattaacaattatctcataataaaaagttaaatttaaaaaaaatatttcaacttatgatagctccaaaatgcaaagaataaatgtaatgaaagacaggaaagacttccacactgaaaattaccaaacgttgcttagtggaattaaagaaagcctaaataaatggagaaatataccatgctcatgggtagaaaaatgtaatatcgttaaaatatcaatttttctgaaattgattcataaattcagtgcaatcccaatcaaaatacaagctgattctaaaatgcatagaaaaaggcaaagaaacagaatagccaaagcaattttgaagaagaacatttgagaatttcaagtctcactgtaaatctactataatcaagataatgtggcattagtgtaagaatagctatataggccaggtgtggtggctcacgcctgtaatcccagcactttgggaggccgaggcaggtggatcacaaggtcaggagatcgagaccatcctggctaggagggtgaaaccccatctccactaaaaatacaaaaaaaaaaaaaaaaaaaaattagccgggcatggtggcaggtgcctgtggtcccagctgctcaggaggctgaggctggagaatggcatgaacctgggaggcagagcttgcagtgagctgagatcctgccactgcactccagcctgggtgacagagtgagactccatctcaaaaaaaaaaagaagaagaatagccatatggattaatggaacatagcaaatccagaaatgggcacacacatatatggtcaattgacttttgaaaaatgtgactacataattcaatgagaagaaagagtattttaaacaaattgtgttggaagaactggatatcaaatgggaggaaatgtctccaattcctacctcacacaataagcaaaaatgacctaaaatggattataaaatctgaaaataaagttaaaattataaaacttctataagaaaacataggaaaaaatcttggcaaccatggattaagcaaaatatttcttaggacacaaatagcacaaaccaacatggaaaaaatgataaactgtatttcaaaaagtaaaaaactttctcttcaaaagatgctattatgaaaatgaaaaaggcaatacacagtctggggtaaaataattgcaatgcatgtatttgacaaagatatgcatccagagtatataaatagctcttataaatcattagtaagaggacacaaaaccaatttaaaaatgagcaaagggtttgaacagatgcttctcaaaggaaattatacaaaagaccaatgagcaaacgatcagttgcccaatatgataaatcatcagagatatgcaaattaaaatgatgataacataccactatacacccactagaatgactaaaattaagaacaaacaaaaaaaaaaccagacaactccaagtgttgacaaggagggctgctaaattgctggtcaaaatgtaaaatgtcattactattttgaaaacagcttgaccactacttaaaaagttaaacatatacttaccatgggacttaacaatctaatcaaatgtacttacccaagagaaagaaaaatatctgtttatacaaagacttgcacatgagtattcatagcaactaactcataatagctataaattggaaacgacccccaaaaccaataagagatgaatggataaacaaattgtgctatatccatacaatggaatactacttagcaatgaaaagaaacaaattgttgatagatggcacactatggatgaatctaaaaaaatataccaagtgaagaagctagacaaaaactacatagcgtatgattccatctagaaaggctaaactaactcatagtgacagaaaaggaggcctggtgtgggtgtcaggaagatgggttggcaaaggcctcagatcaactactgcccacagtcagaggtgaaagagttgactgtaaggtgaaacaggaagactttcaggggtgatctaaatgttatatatctagattgtggtggtgacatgggtacataaatttgtcaaaacttattgaattgcatacttaaaatgaatgcatctgattgtattacatcattgtatgtaaatgatcctggacccctatctcacaccaaacacaaaaattaatttgaaatagatcatagatctagatgtaaattcaacctatcaaacttctgggaaaaaaaataaaccaagagaataatctttatgagttttgtcagcagattttttggggacataaaaatcactaaaaagagggggggatcaattaatttaagtctccccaaaaaatctttctcttcttaaatcagtagttataatcctagcagcacatttaagtcatctggagcatgtacaaataaaagcacaatacccatcccagactaactgaatcacaatatcttcttgagaaacattgacttaaagtttggactccattgattttcaaagcaacaaatgtgcctcacagagaggttatgtagccttacatctctaacatatgaaatattttttgtttgcatatgaatacataaatggagaaagtaagttatatacacgtattaatttattcaatttgattattatgtatcagggactatgttggatgcttagttacaaaaagactgagacacaatccttggccacaattataggaagagtcagagttctaggtgggataaaagttgtgcaaatatatgacgtgcatacacaaagagatagatttcatcttgtgtgggtgtcaggaagaggagttggcaaaggccttagagaagaagaagggatttccattaagccaagtctcaaaagatgattatgatgtgatctggttgtcctggacaacttgactaaccacacctccgcaaccccgcaggcaacacacacacatttttgtgcacataccggcaacatatatatttttcaaaatcctaagtatccatgcctgccttatagttaacgtttcgaagattctttctctacccattgtcctggattaatatcaaaagagaacgaagaaagaagcttaagggagaaaatccactgcatcttcagattgtttccttctttctgatctcaggaggtccagggaggtaggaagaaccttttcacctgtttcctcatattgttcctctattgtcctctccagctggtaagccccaacatcgtgtatcttaaaaagctaatgaggccaggacagaattgccatttaaattctttagtaacatttcctcttacagtctgagctcttatcctctgacttgtttccttaagtttctatcaagctcctcagtcaggttagttggaatattcccatgcttcttcctttttctgttagagaataaggtctattatataactccttcatctccttagaaatacagatagcctatcagcagttttggaaaaacatcccaactgattttagggcattgaggcgtttgatgggaggaagctatctatacaaagagtgaatgctgtacaaacagcaaactttacagggaaaaagttgatatttatagatactcatttataccccagggcaagacagacagatagatagatagatagatagatagatagatagatagatagatagcaatatattgatatctgtttatccattgagtcaaacaaataaacacacatagattacaaaggtccttttctcttcccatgcctgaagagaaaggaggcctgtggtttctttccatagatatgcatcactcctgaaaagcacactcacatcttgtttatatattacagccttccgctacttcaccaaatgtctcctggcctttgctcagtgagccagttgagctcccagaaaaatccttcattctttcccaactgtgcctcccaagacagatgttttatatcaaggacaccaagtcctgccctgaggacttagccagcaaaaactcactagaggcccttgccttcaggagatgatgtaaccttggagagatgtgtgctacaatctccctgcaaaggcggaagacagcgtgaactcacaggggacccaggccagggtattgggtgggccatccctctctgttgtgatgagtggctatagtgtgtaagtcagcctgggaaaatgtctgctcagtcccaggagtggattccacagctctttggttgacagttcagttcccaccatcttctgcttgcaagtcttcttagggcaatgctgcagggtaggtccttgtcctgttttattcaagagcactcctggtatggccccaccatctgtgcagagagcaaggcttcacatgtctccagggtcttatggtaagttggatatgacaagtgagaacccagcagtctggggacagtgctcagagcagtgtaaagggcagtcacacagccaagtactttccaaggcagggcaggccttgccagtcctcactcagagatgttcacaccagccttgtgtacagcatgcttagctctttgatttctgagccctcagctatcacaagtagtcaattctcaggagaggctgagttgggagatggacctaatgacattgcctagcacacagtaggcactcaaagcatattagatgaatgacagaatgatcaaacagcatcaaaaaggcacagctaactagaagagggggcccaggaaaacaaataagtaaaattgatgctttcgtgcctgggccctttaggacaaggaaaagaactcaggattgcaaactgctagtctgaactagggacttgacatttattatctgagtcactcatgtagtcatcctgggaggtattaggaacacccttttacagatgcagaggtggaagcctggagaagggaagtggttccccccaggtcctccatccagtaaggggcaaggcctcagtcccaacaaagctctacctctgttgcagctcatagctcagtttcctcaactacagaaaggatgcagcgttgcttatcaaatggggtggtttcgaaagcagcatatttaaactctggattaggaccccattaaacttgaatctggatcagatctagggagaagtttacttttgtgctattcataaaagaaaaggtttagaaagccaagaaccgtgtaaaccacattgctgggtgggaggatgtgaaaagtatgtaagcaaataaactatctctaagcaactcaaacataagacaaacatttatttgcatatagatgagtgatgtgattgcttctgcctggaaccatttttcacttttctgtcttttcccctttttttctaactaacttttatttatccttcaagtcatgccttaactgtcatgccctgtggaaagcctctactgacccctgcactaagtgactcacttctattatactatcctgtgtcctccattattttaattgcttgtttattttctgtcttcctttccaggcagcaaattccacagtaacagtagcaatgatgtccttagcacttagcacagtccctgacacactgccaaaagtacatgtaaaatgaatatatgaaagaataaatgatatgctaattacaaatcacaggttcctctaagatacttttcccaaacaagtcactaaatggattgaatagtcactcctttaactgcttgttctctctctgtgcctttttcaacaacttttgattaaatcgctactgttcatcagattccatactagatgaaatagacacatttatttgccctacgtaacccactgtgtcccgttcacatgtctgtagagtgcccataatgctttgtagcactcatctatttacatgtttgtctctacaactaaaaggctataaactcgtagaactcagagttagggtattgatcatcttacatcaccagaacctggcacagtgagtggtagagaataagtactttataattgtatttggagtggtgaataaaatattttaaattgatacagccctttggaaatcaatctggcaaaatgaattgaataccttaaaatacttatattgactacttctaatataacataagtaaatcattcatcttaaacaaaaatccctatgtaaaaatatttatcaattatagtaacaaaatgtgggaactagttaaatgtctatttgtaaataaaaggttaagtaatctaccacacacgtctacatgttggagtattgtgcaggctttataaatgatgctaaggaagaacacaggaaagtgatcatgaaatcacttttaattaaataaaatttaagtattaaaattgtattttaaataccatattcatatattcatttttgaaaaaaattaaagcaagctaattataggaaacacaatacatgaaagaaatagacaaacatatcatgtgtttggtgaatgatcaatgggcattttgcttttatttccttatgtgttaagtaatttccaaattttcttaaataagtttgctcattttttttcttttttttctttttttgagacagagtcttgcactgtcgcccgggctggagtgcactggcgtgatcttggctcactgcaagctctgcctcccgggttcacaccattctcctgcctcagcctcccaagcagctgggactacaggcacccgccaccacacccagctaattttctgtatttttaatagagacagggtttcactgtgttagccaggatggtctagatctcctgaccttgtgatccacctgccttggcctcccaaagtgctgggatgacaggcatgagccaccgcgcccagcaagtttgctcattttataatgaaaataatgtcattgaagacttccatttccaaccattacagagaaatgagaaccaaaatttacctcccaccctaaacaacttataaaactgaacaaaatacatgaaataacagttttagatattgaacaagaggtggcaaaggagaatgatccatgagaaaaagtaaacaaatgatgtgagcactacgaatgccccagctcactgtctagagagtatgtcaaggtcacagcacaagcagaagcagcccatgcataacctggaggtctccctgagttgaggaaacagagttcagagttcaagaggcaagaattctcagaatagagcaccagagaggagagagcttcaccgagagagagagtctcagagagctgaagaggatttcccttgagtcttctgttgagtgctaatctatgcatctgtgtgaagaaactagtaagactaaggaaagaatcaccagaaaggagcaggctttcttaatgaggaattgaaattactaattcaatctcttattatagatctattcagattttctatgttttcttgatcatttttggtaatctgtttttttaggactttgtccatgccacataggttatctaatttgttagtatacagtcgttcatagtattccttatagttattttatttctgtaagatcagcagtgatgtctcctctttcattctaaattttaatgagtcttgtctctctttctctgtcactctgtctctctctcacacacacacacacaaacacacactactcctctcctaccatccatttacctgaatgtgagtcaattttgttgatgttttcaaagagccaacttttcaattcattgattttctctattgtttttctgctctattccatttctttctattctaatatttactatttatttccttctgcttgctgtaggtttagtgtattcttctttttttggtttcctaaggtggaacattaggttatttatttgacaattctctctctcttttttaaatatagatatttgtagctataagtttcactctatgcactgctttagctgattcccttaagttttgctatgttggaaaagaaaaacaaataccacatgttctcacttataagtggaaactaaacattcagtatacatggacacaaagaggggaacagtagacactggaacctacttgagggtggaaggtgggaggacagtgagggtttgaaaaactacctatcagtacactatgctcactaccttggtgacaaaatcatttgcacaccaaacctcagggacacacaatttactcatgtaacaaacctgcacatgtatcccctgaacctaaaataaaagttgaaagaaagagatttggtatgcagtgtcatctcaaagtactttcaaattttctttgtaatttattctttgactcattggttatgaaagagtgtgttctttaatttccacatatttgtgaagttcccaattttcctttacttattgatttttaattatatttcattatagtttaaaaaatactttgcatgatttcaattcttttaaatttcttgatgcttatattatggcctagcatatggtctatcctggagaacgtttcatgcattattggtaagaaagtatcttctgatattatttaatagagtaacttagagatgtctgttaggttgactatttggtctatagtgctattcaactttcatgtttcctcgttgacattttgcctagttattctatcaattattgaacatgatggattgaaatctccaactattattgttaaaatttcttatttcttctttcaattttgacaatttttcttcatgtaatttggtaatttgttgttaagtgtttgtatgtttatatttgtttaatcttccttataaattgaccttttctttattataaaaatgttgttctttgcctctagtaacaatttggtctcaaaatttattttgtctgatatgagtatagccggtcaagttgtctactggtttttgtgtgcatggtataccttttctcgttattttattttcaatctatttgtgtcttgaatctaaactatatttcttgtatgtggtttatagttggaatatgctttgtttgtttgtatgcttgcttttaaaatccattgtgccaatatctgcttttcactagagcacctattccatttacacttaatataacaaatagttacattattgtaattaattagaaggtaggatttatgtctgcccctttgttacatgtctacatgtcttaggtcatttttgttctctattttttcattactgcattttttgtctcaaacagatatgttctaatataccacttaaattccattgttctttcttttaccaagtttttgtgagttgctttcctagtgttattcaaaccagataggaaaagtttttccaaaatacatttatagttttatatgtacccatgtagttatccttactgatgctctttattacttcatgtggattcacattaccatctagcattctctcatttcagcctgaagaacttcctactatttcttatagggaatgtattttagcaacaaattctgttatttttttctatgtaatatctcagtgtttgctttatttttgaaggatataaaatttttggttaactaaggggttccgcctcccccccacccccagcactttttaatagatcatccttatgccttctggcttccatggtttctgataagaagtaaactgttaatcttattgaggagctcttataagtgatgactcacctttctcttggtgctctgaagatccttgtctttggttttggcaattttattatgatgtatatagatgtgaatttcttttagtttatcctacttggagcttgttcagctttttgcatatgcagattaatgcagttcattaaatttgctaaattttcagccatcatttaaaaaatatctttttcttctcctttttctttctcctcttctctggaattcctactacgaatgtgttggcacacttaatggtataaaatatttgcttcacaaatctctgagaatctattcatttttctctcttttcttcaaactaggtaatcccaaatgacctgtcttcaagtttgctaattctttcttttgccaactcaaatttgttattgagcttctctaccaaatgttttgttttagttactgattatattggtccattttcatgctgctgataaagatgtacccaaaactgggcaatttacaaaagaaagaggtttaattggacttatagttccacatggctgaggaagcctcacaatcatggcagaaggcaaggaggagcaagtcccatcttacatggatggcagcaggcaaagaaagaatgaggaagatgtaaaagcagaaacccctgataaaaccatcagctctcgtgagacttactcacaatcatgagaacagtatgagggaaactgcccccataactcaattatcttccaccaggtccctcccataacacatgggaattatgggagtacaagtcaagatgagattagggtggggacacagagccaaaccatatcactgacttttcaactccaggtatttaaatataatttctatatttttattgacattctctatgtggtgatacattgctctcatactttcctttaacttttaaaacatggttctttagttctttgaacatacttataaaagctgctttctgtctagtaagttaacatctgggctaactcaagaacagtctctactgactacttctttttccccccaagtacggatcattcttttctgtttctttgtagttgttactatttgtttgtatagtagcttttctaaacttactctgtaaagtctgaatttcttattatgagcagccactgaagactctgctcagttctcttaatgatcaattattgatttgacagagatttccttaaatgccttgaaccaataagtctcctaccatttatcaagggactctgtgtgtgttaggtcacaccttcaatgccacagccttcattgcctgcatgtgttagacctcaaggtcatccagagataagagattagggccttctcagtgctttcctggtcatgtacacagcctcacatatgtgcttggtcttctagaccccaggaatatgttggtgctttgaatatctcattccccagatcccttacgtttactttattttattttattttggcctcaaatggtatcattgctacagacagctgtgactttagataactgcactgattgtttttgatatatgtccttgggatcaggcttttcagactgaacaagctttgtgtcaggtgaaatattgataagccctacaaacagagtttctctggggaactttcgtagaggtcaaatattttctctttttgaggctccccaaagccatttgatcctttccattggctattaggttgctggttttcatgggtaccacggttatgaaactactggtcttcaaggctattccagagctgaggagagggagttaggactacagcaggttaaaatgccacaattcttgctgtttttactgagattcagccttttaaaaaaacaagactttgcttaattcagccttttaaaaaaattaagactttgcttaatttccagagttctgaaaacattgatttcaacaattttttatgtttctttttttagaacttttattttaagttcagaggtacaagtccaggtttatttcatagataatacataggtaaactcatgtcatgggggtttgttgtacagattatttcatcgcccaggtattaggcctagtacccactagttgtttatctgatcccctccctccttccaccctccaacctctgaaaggcaccagtgtgtgttgttcacctctatgtgtccatgtgttctcatcatttagcttccacttataagtgaaaacgtgcagtatttggttttctgttcctgtgtcagtttgctgaggataatggccacaagttttatccatgtccccacaaaggacatgatctcagtcttttttatagttgcattatattccatagtgtatatgtaccacactgtctttgttcagtctatcatagatgagcatttaggttgattccatgtctttgctattgcgaatagtgctgcaatgaatatgtgtgttcatgtgtctttataacagaatgatttctattcctttgggtatatacccagtaatgggattactgggtcaaatggtattcctggttctaggtctttgaggaattgccacactgtcttccgcaatggttgaactcatttacatttccaccaataatgtaaaagtgttcctatttctccacagccttgccagcatctgttgtttcttgactttgtaataattgccattctgactggcatgagatggtatctcattgtggttttgatttgcatttctctaatgatcagtggtgttaagctttttttctaattattttggccacatgtatgtattcttttgaaaagtgtttgttcatgtcctttgcccactttttaatgagcttgtttgtttgttgtaaatttgtttaagttccttatagatactggatattagacctttgttgaatgcatagtttgcaaaaattttctcccattctgtaggttgtgtgtttactttgttgatagtttattttgatatgcagaagttctttagtttaattagatctcatttatcaattttagcttttgttgcaattgtttttggtgtttttgtcatgaaatctttccccatgcctatgccctgaatggtattgcctaagttgtcttacagggtttttataattttggggttttacatttatgtctttaatccatcttgagttaatttttgtatatggtgtaaggaagaggtccagtttcagtcttctgcatatggctagccagatattccagcaccatttatgcaatagggaatcctttccccattgcttgtttttgtcaggtttgttgaagatcagatcattttaggtgtgcagtcttatttctggggtctctattctgttccactggtctatgtgtctgttcttgtacaagtgcctgctgtttttgttactatagccctgtagcatagtttgaagtcaggtagtgtaatgcctctagctttgttctttttggttaggattgccttggctattgaggctcttttttggttccacatgagttttaaaatagtctttacttgttctgtgaagaatgtcaatggtagtttaatgaaaatagtgttgaatgtataaattgctttgggcagtatggccattttactgatattgattcttcctatccatgagcatggaaaggttttctttgttcgtgtcatctctgatttctttgaacagaggtttggagttctccatatagagatctttcgcctccccaatcagccatattcctaggtatattaatctttttgtggcaattgtgaatgggggttcattcctgatttggctcttggcttgatggttgtcggtgtataggaatgctagtgatttttgcatattgattttgtatcctgagactttgctgaagttgtttatcagcttcagaagttttggggctgagacaatgaggttttctagatataagatcatgtcatctgcaaacagggatagcttgacctcctcttccagtactatgttgaataggagtggtgagagagggcatccttgtcttttgcctgttttcaaggggaatgcttccggcttttgcccatttagtatggtgtcggctgtgggtttgtcatagatggctcttattattttgaggtatattttttcaatatccagcttattgggagttttaaacataaatgaatgttgaattttataaaaaatcttttcttcatctattaagataatcatgtggtttttgtttttagttccgtttatgtgatgaatcacatttattgatatgcatatgttgaatcaaccttgcatcccagagatgaagcctacttcattgtggtggatgagttttttgattgcaccatattttctttatccaatccatcactgatgggcacctgggtttatttcatgtcttcactattgtgaataatgctgtaatgaacacacgagtgcatgtgtctttggtagaacaatttattttcttttgactatatacccagtaatgagattgcccactttttaatgagattgatttttctttcttgtaaatttgtttaagttccttgtagattctgcatattaggcctttgtcagatggataggttgaaaaaattttctcccactctgtaggttgcctgttcactctgatgatagtttcttttgctgtgcagaagctctttagtttaattagatcccatttgtcaacttttgctgttgttgcaattactcttggcaatttcatcatatccatattctgaattctacttctgtcatttcagccatctcagcctcatcctgcttctgaacccttgctggagaggtgatgctgtcctctagagaaaagagggcatgctgactttttgtgttttcagcattcttgcactgcttctttttcaaatttgtgcgggcttatttaccttcaatctttgaggttgctgacccttggatggagcgtttttttcttttaacagtctggccacctttccatagggctgttgtggtttgctgggggtccactctagtccctagtcacctcggattttccagtacctggaggcatcaccagtgaaggctgtgaaacagcaaagatggcagcctgccccttcctttgggagctccaacccagggaggtacggacctgttgctggtccgaacacacctgtacatggtggctggagaccctggttgggaggtcttgcccaatcagtcaggaggaacgggatcagggtcccacttaaagaagcagtctggccatgctttcgttgagcatctgtgctgtgctgggggatcccttcctccttccatcagtttggacactccaaagcctgcagggtggaatggctgagttgcccaaacagcaaagttggcagcctgcccctcccgctgggagctctgtcccagggagaattcaaatttctgttagccagagaacaccagcaggggtggctggaggccctggttgggaggttccacccagtgaggagaaaagggatcagggatccaattaaagaagcttctgtagagcagctgtgttgtgctggggtactgcttctgccctggtcgacttgggttttccaaagcctttaggctggaacggctaagtcacccaaacagcaaagatggcagcccacctgtccctctgggagttctgtctcagggagaattcaaatgtctgtcagctggagaagactagtggaggtggctggaggccccagttgggaggtcaagcccagtgaggaggaacagatccaggacccgcttaaaaatgcagtggggtcaagtttgggtagagcagctgtgctgtgctgggggatctcttcctccctccatcagtttggactctccaaagttcgtagggtggaatggctgagtcgcccaaacagtaaagatggtgctcccccccgccccacccccagggacctctgtcccagggaggcgcagcactgctgctggtggctgaaattccaagccagtgggtcttatcctgtgaggtgcaatggaagtgactgctccactccctggattcagcctctttcttagggttatgtacgggggtctattctcccgctttgctagagttgcagttacttttgctgggaagccgggagccggagtatcgaaagctccaggtctccacatatgcctcagtggctgctctgtgagactccacatagctctctgtgccggactgaaggccctggtggagtggcttctgaggggatctcctgacctgagggttgcaaagatccgtgggaggagcatggtttcccagggtggcacattcactcgccacttccctgggcaggggaggttcccttgcctccgtgtcactcccaggtgggccatcatcctgccttgcttttctccgttctctttaagttgtttcctttattagttccaatgcaagtacctggatgtttcagttgaaggtgctgcatttactcgcccctttcattcctctctgtgagaaccatgcaccctagctgcttctagtcggccatcttggctgtgccctggataatttttcttgtttcctcttaggggaagagggttttcaggggtccttactccaccattgcagaagttctgcctcttatttcccttcatttatcatgcaaaaggcactataaaatatatactctttttggtacttgctttttcccccaatttaccaatatatcttagaaataattccatataagtttacagagatcattttaaatttttaaactccatttaaaaaactcctttgtgtgaacgtactgttatttattaaactaatcttacatctatgtgcttttaaattacttcttcaagataatttatctttaatacttaaagttacatgatgctagatgctgtactaagtatctttatgcattatctgatttaatcctcaaataataattataaatagtaataataattcctgaataataatttaaagtagatatagctgtaggtggtatcttgttttaccatgagaaactgatgcctattgagatgaagaaagctgcctaaggttacacagctagaaggtgatgaaaccaggtccagatttctcatctctctgacaccaaagctcttgctgtcacttactatgtcacatattgaagaaagcccttgataatcaaaagccaccagccctgagtccccggtttggcactggagcaatgcaactggagcagcttcaaaggaaaataatgcatcatgagggtacattcatggatcctcccgggtatcagaagattcaccagaagacatggtctcaagaagcaaaagccaaagcaggagagaagaaattgaagctgctaataagtgatgtttgtgtgcacccttggaaaaaatcctgataatgattctagtaaaaccttagtaaattttcatgaaagaggccaaagtagagtattatcctaagaattgagaattcaaaactttggggattatttgaaattttatgcatgaacatctatctagccacctaaaaaataaatatattgtttcatttgattacctcaaaagccttatgaagtgtgtcagatgtttaaaacttctttacaggttgagatttttcaaaagaaaaaaattctttatttttattattataaactgtaatttaaagtatcagtaaagtcagtgggaagatatctcagtcttcccatggacaggaaagattcttaagagagattagagattctttaataacagatgaaaacagaatcagggaaatacagttgttaatgtagagttgtcaaatttagcaagtaaaaatagagaacatctagttaaatttgaattgcagagaaacaacaagtaattttgtaatataagcatgtcctacttactttactatgagtatacttatactaaaaaagtacttgttgtttctctgaaattcaaatataactggatgttctgtattttatctggcaatcctatgtaatgtgtctccatttacctcccgagctactgaggcctggagaaaagagttacgcataacacagaaataactggaaatgtcaccatcactggaatgccttcccagcaacttgcatcatgtattcagtactatatgaccttgaacatgtttgtctcttgcacttgagtttctcttattgcaaaacagaattctcactagagataagaagagccagcaagcatatgtaaggcctctttacacagtattgtatgtatcatatgctcactaattttcaaaagaaattgtactatgattttggagtttctttacactcccttgacagttttagaatcagccttctcattttttccccatccattttgtctttttttaagggtaggaaactgagaactgactagcaggcttggaggactgagatgtagtcctgatttattctgtaattgatatatactctgtttggatgtgggtgggttggggtactctcattgttcttcaaatctggtaaaaaatttctcaacaagttgaccgatattcttccttctcccctaagggaggccagaatatccatcagactctgagtgtacctacatccatgccattcagctgtggtaggggttggttatctagacatagcccatgacccaggtggtagaagatgctaggtaaaccaagcagtcacattgaagcaagctgtgaaaagtgctcttggtatatcaggttctataaccgaattcagtggagatcttgacctccacaagttgaaaccggaaagtgtcctgtgcctactttgtaaaatccattgatttattaaatagcatcactgtatatccaagaatggtatcccaccttctccattaaacgcatatgttcaaagattcataagttgctcatgactctctgtaacagatctgtttgatccttttggaggcaaaacttaagtgctataggaatgacacatttatgattttctgatagagtttttttaaatatactttaagttctgggatacatgtgcagaagtttttaaataacaacagtctgaatgtccggcttttttctgaccatttctcaaagatttcagacagatcctcttataaagaaaaggtctgaagatgtattctcttttagcacttgctaaaattttttgttcatagctgttcccactgataacatttgaagaaagggtaattcttctacaggtctttatttgatctactcaggtagcatctaagtataattgtgaaatattttacggggtagcatctcctcttggaaaaaatcttgataatgattctagtaaaaccttagtaaattttcatgaaagaggccaaagtagagtattatcctaagaattgagaattcaaaactttggggattatttgaaattttatgcatgaacatctatctagccacctaaaaaataagtatattgtttcatttgattacctcaaaagccttatgaagtttgtcagatgtttaaaacttctttactggttgagatttttcaaaagaaaaaaattcttaatttttattattataaactctaatttaaaatatcagtaaagtgcaaatttctcaaatgactaattctaatgaaattatttgtgactttaattggcacagtgcctgctggcaatgcctctgtttcttttaaaatataagatacattgctcttcaaaaattgttttgtacaatgaacacactatctgtagcatcattaagaaacaaaagcctcatggaataggtgtcattattctcattttgcaatgagactctgaaaactgaagagttattcccaaggacacacagctgatattttaaccaaggtctcctgtttcaaacacaaccacacatgatatttagacgggacattatttataaccaatattggtttaatgagagtactgaatatggcttaaattaatattagcaaaattaacaactttgacattgataactggtgtggttgatattaatgtcaataataaataaagagaaggagaaggttaattttgaaggaatgctgagatgttggaaaacgataaaatcttaagcataaaaaaagaacccttttctgaagggcacatttgtaagaggcatgccagttggttgatattctgaatcattgccaggatgatcgcatgctcatgggtgcttagataaggatccatttctcccagcagggtcgaccattgctcaaacacccgagattgagattatctctgtccttgatgttctagcccctggggtcaggagttcagcttggaagcaggtcctcaattatccctttacaagagattctcagtgtagcacccttaacacttcctgatttcatgttgtctgccttttgatctataactgtgtatgagttttgtcaaaacatagggagtcagggggaatcaggctgttataaaaaaccaggccaattaggtcattcaacccctcttaaaaatcacccatgatggcaatttggtcatcatttaactaaataaaatcaagaagaattacggtatggctacgaagctgtatctaacatctaaattaagtacttatctcttttcctctctttatttctacttttaaaatatgtcttagaggttcagaagcttccagtcaaagtatacaaaagaattattaactattatttctccccacagattgtgcctcacataagcttggagttgcacagtagaactcggtggcagagggacccttgcttgggctttgtctggagaactccagctcccagcttatccttctggatcctggtccttgtttagcctcatcacttagccaccctgggctacattttctttactggcaaaatgaaatagaataagtaagacctactatttgatagcacaacagggtaatcatagtcaataataacaattgtgcattttaaaataacttaaagagtataattggattgtttgtaagtcaaaggataaacgcatgaggggatggatgccccattgcctatgatgtgcttatcccacattccatgcctgtatcaaaacatctcttgtatcgcataaatgtaaacacctactatgtacccacaaacatgaaaaatttaaaaaaatttaaagaaaatttagaagtgaagaagaaacccagagtaaagaagatggatgaaataatagaactctaaatcattttccacttccacattctatattttccaaatgattgcagggaaaacagcttctcactttcactgaagctctcctactgtcacttatgcccacatggaggttgggtgcatctaaatgtaagggagggtgccaggaaggtgagaagaaatctccaggtcaatcaaagcccagtctgtgatttcctgtctgtcttgaaaatggggatttcccaagcttcagaaccagcctcactcattagggataacaatcagggtaattaacaatgggtgtgcactgcacaatcagaaagacccaatggtatttggcaatgaaaagttttatacaggaactgttggctcccttttgtctgtggttaggtaaagatgaaaaatagaaaagtcaattaaaattatcctagaaactctttattactttaaaataagaggagtgaaaataaccccggactatgtaatgcatctgaggacattaactaatagctattagtgtttgcagtatgtttactgaaccctgtaaaatgagatggtcatttatagaacttcctctttccagaaaattctgtgactacctaagcagcttgactgtcccttgtgaggaaagggcgtgttttttgagtgcacaggccctgcagtgtctcccatgaggtacggtgtgggagagaaactcagtcttagccaaatcactgtcccacagtgaagtaagtaccttatatgacctagaagaggataaatcaagtaaccttaaattcatgagaactgcttttgtttctagcagcaatcagagggttgagaagatgtgggctggatgaggagccaaggtactgtatactaatgctaggactgtcctaggccccaggaaataagaagaggaactcggccaacaacggggcagccctgaatggagctcacggtttagcaaaggaggctgatttaagggagtaggcctacactgtgacttcctggcagtgctgaccttggaattgcccaagaatcagagatagccttaaaattgtgacaaggcaatgagggagaagtacaaggcccagaggaaaatgggttggtcgatgtttggtggcataaggactcccacaacatccatctgcagaacctcagaggagtcaataggaacccttagaattaatcacaggaatgagtgttgccattttccaggtctctatgatatgcttgtggccaggcacttcccatacatcatctcacttaaaataagggtcagacacttgacactccacttttgaaaggttgatgacccataattagagtgtgcgggaggggtccctacttaaagtttggatacagaacatgctttcattcacaagaaaagaatgagaatcaggatttcaagtgtgctaatgccttattaaattgtcctaataatccattgtttatatgcagagatgtgataactgactgacagactctcaggaccatataattgtgggattgtttcactagcaatgagagtaagtttggtctcttataaaatctgccagctaggcagatggctggtggtcttggggcagcatggtgccatggaacacagactcatggcttgagtgtcccaattccctgccccaccgcttggccactgggttgggggcagcatgactataattgatttgcttcagtatcaagctcagaagtgtggcctcattctcatgaccagacattgtatcactgggacttgagtttggggactgtgtaattttactgatgtcacgatggttttataagccactgtgtaaaaagttaaatgcaagtatttaaatctccactaaatgtggatttttctgctcaactaataaaaacagcttagtcaactaatcaaaggattagttttaggagacctaaaaatagagcgccatgtgccactagcatctttgtccagtatccctgatgattaataatcaatttaaaagagatatttgtggagaatttattagaatccatgcaatgctattcaccagcacactttctcatttttttcttcaagacatttaaataatagaaaaaaatacaaaattagaaaaaaatattaaaatatttccagcatacttacatttgatattaaattctaaccaaaatttgaccagagcaaaagaaaattgcaaaaccacatgactattccaatcatatgagtgggcagggtagaaaaagtcggggggcaaatagaataaatggtaagagacagcatataattcataatgtccataaaaatagttgtcctttaaaccaaaagttgtaataatgcctaaaataagtcattgtgtaaggaattttaacagggccaaaatctgctatgcctcttaaattactaacaaacatttggacttgttttggagtggtttttttttgaacaaatggtttaaagatttcattgaatttcctcctacataatacttaacttttgacatatggtcagctaaaaatattttggattttattaaatattgattgtggagaggtaggtcatggaaagaaggcatgggtgggggcagattctttgcctttttctccttaaatctatgggcaggggctgggtgtgttggctcacgcctgtaatcccagcactttgggagaccaaggtgggtggatcacctgaggtcaggagtttgagaccagctggccaacatggtgagaccctgtctctactaaaaatacaaaaaaattagccaggcatggtggtgggtgcctgtaatcccagctactcgggaggctgaggcaggagaatcgcttgaacctgggaggtggaggttgcagtgagctgagatcacaccaatgcactccagcctgggtgagaagagcaagactccatctcaaaaaaaaaaaaaaaagaaagaaagaaaagaaaaatctatgggcaggttccactgagacccctgagaatgctgacccattagagtcccaccctcttggctatcctggtgcccctttgactaacggtgcttctctctacttttctttttaaggaactagaagagagacaccagtatttcatgtgcactaaattagggtagggttttgagagataaaggcaaggggaggaggagtgtgcatttcaggaaggaaacaaagtgaacaattgtgggcatggggtcaggaggaaggagcagcttacagaagagcagtttggctggtgaaaagacatgaggtgatagaagaaaaggaaggggaaggaaggttagggcacattagtaagctctccaccacgattcaattatatgaactcagctattaaactgtcactctgatatcctcctctaatatttttttcacctctcacattttcagtggaatcatacggacttggatattgttgtcatggaaaaccatgggacttgagataaagattcaggaatcattcatatgaaggtgatatataaagcagtggttggtaaatttaccaaaggataatgtgaggggagagaaggcaagaagatcaagagcaaaatttagggtcgcatccatagtcagaggtaggaaagaagaggaactgccaaggagattgaagcatcacactgagaggaagggggagaaccaggatagggtcttcccaacagggtcacctaccacaagataccaaggaagatgaaaaatgggcggaggaaattggatttggcaagtaaggtatgactcctgatctttaagataacacagtaataagcatgactaaggaaaaccaccccacagatctggaccacactgagagatgaggtaagatgaacttctgcctgtaatctcagctcctaaggaggctgaggcaggaggatagcttgaggccaggagttcgaaaccagcttaggcaatatagcaagagtcctatccaaaaaaaaaaaaaaatagacgaacctcccagggcctctagttctcaggtgtagtgctctaggtaatatgcaagcttgagaagcccaggtgaaatgctaccaaactgaagctccttagaggagccaaaccacctgttcactatctggactgattttataccgttagagttcaccagaccgaggaggagttagaccatgtctatctcacaatccatgtcttagctctaagggaaaagaagagagcccacagtgatggtgcctgatttaggaaaagtttcagtgtgtcttccttagggtccctttgtccaagcttttcttcagaagcagggaaaacagaaaaatatttaggaacaaatggagatgccagagaggaagaagtggggattaaggaagaataagggtagaggcgggaaggccgtgaatgcctggatgaccttccccccaccagaggtgaaggggtggtgccgttgtaaggtacaaaggtcccctggagggaaccagtgctttcctccctaaattgttcatacccaataataaacacataccagatagcacacacatggaatgctgggggctgttggaagcagacccaggctgtcgggaatcccctgaaccaaggcatgaaaaacattctcttccttcgcacgtgtaacactctcccagtataactgtttctcttaaagccataggtgtctgtttttgagtttgctccttggagacagaaacaggattacaatatatggtgttttttcctcatttcctgctataggctgttttaagtttctgtgacagcttttctacatatttcttccttcaaatggtgaatctatgtatggccatgttaatgactgggacatagacttaaaatgggaatgcttaggaaatggaatgttctttaaccagtattgtttcatctgctattattggggaaaaagaaatctctctacagatttcaaacccactttgctggtgcaatggaatgatcaaatagactctctctttgaagatctggcatcttgtccagcctcagagtcattatttagattatcatttgggtcatcggtgacctcagtgctgtggaccctgggagaaggactgaggattagagccagaagacgtgggtttcaggattggctctacttagtagctgggagattctaggcaaattgctttttaaaaaaaattcaaaattctctaaatctgtttcctcctctgaagagtgagaataagacgcaaacctacctacttctcaggattatgtgaagattacaaaaatcctctgtgaaagcatttccatcaacctcaaactctccacaactctaagagctggaggcacctgaaaccaggctgaatctgtacaaatgggacaggtgggttctaaaagttcatttataaaagaaacctcccaagtgagtctaacttgttctttatctctttgtcctgtaaggggccactggaaaaaaatgagtcaaagttttccattcaagtgaattttcagatagttgtctgcatcctcacagaacagacaaagaaatcaagactttacaagttgtttatttgttttaaagtgacttttcccaaatcttgcagctagcaactgtcagtgtcgggattcgcatctgaacttaagacctgcagggagaggctgctggaatttctgcttttcataaagccctgaagagcgtgaacaaaaagacaatgggggaacatgagtcaagccctgtagcaggacctagactctgaggtgagggccacccctgaagctccaggcttcaggggcagcactcaggagaggcacttcttctgatgggagaaaactgaatgggacatttgcagtaaggggtgctggtgggtactacatgtggggccacactcgagctgccttctcagtcaacccctttggcagcttgggccaagtctctctgaagaggaagactgtgatatctgaactcgtgagttcacagagtgctcacctggagactttgtgagaaacagactgggaagatctctgtaaaagaatcaggccaggcacggtggctcacgcctgtaatctcagcattttgggacgccgaggtgggcggatcacgtgaggtcaggagttcgagactagtctggccaatatggcgaaatcccatttctactaaaaaatacaaaaattagccaggcatggctgctcatgcctgtaatcccagccactcgggaggctaaggaaggagaaccacttgaaccctggagacagaggttgcagtgagccgagatcttgccactgcactccagcctgggcgacagagcgagactccatcttaaaaaataaaaattaaaaaaagaatcgattgctggtaggagagggttccttcttgcactcagcacagtggctgaccaagacaagtaatccagaccatgttggtgaccaggtgagcactggggatgccgggaggggtgacatcacgaggacagtctatgggaagacactgcctgagcacgctggtcccccattgacatgtggccttcgagacaattactgcacaccacgcccttgcagttgaagcaggaaagagtaacacaaggtattttgattgcacatggaatattttctcgcttcttcatctcattctttttctaagagcaatgcctaggtttcattcaaaggttcagaaacctaaactttagttttcctcattattcaccccttagaaatgtgaccattgtttccctcttgctacgaccccactgccctgagagaagaccgtgtgatgcgcgggcacaagcagaggctttgccagcaggcaggagtgggtctgatgtctggccctgacttttaccacccctttaatttcagaaagccattcagggccttgcgcggtggctgacacccgtaatcccagcactttggaaggccgaggcgggtggatcatttgaggtcaggagtttgagaccagcctgaccaacacggtgaaaccccgtctctactaaaatacaaaaaattaggcgggtgtggtggcacacacttgtaatcccagtactcaggaggctgaggtgggaggatcgctggagtccaggacacagaggttgcagtgagccaaaatcgggccattgcactccagcctgggcaacagagggagaccatgtccccccgaaaaaaagccattcggcaatgaggccctcattgttagacaagaataattaatgaggtgtcatcgagttgttgaaaagactacatgcagtaagtctgtctggtgcttcatgagtacctactacatggtagccattgttttaataaatagggaggtgtttctattaaaaacagaacttggccaggggcagtggctcacacttgtaatcccagagctttgggaggccaaggtgggtagattgcttgagcccaggagtttgagaccagcctggacaacatagtgagaccctgtctctacaaaaaatttaaaaaattagctgggcatggtgatacatatctatagtcctggctactcaggaggttgagatgagaggaaaacttgtggccaggaggttgaggctgcagtgagcagtgattgcaccactgcactctggcctgggtgacagaggagactttgtctcaaaaacaacaacaacaacaacaaaaaaacaggacttaagatgagtcttcaaccagtctcaggggactgcaacttttctgtgtaaacaatgcctaactgtgtaagaattgtcgtatagaattaattgcccatcctcttcctctgtctccacatcaaagcatctgagatttctgcttcacccccaataagaccggtccgctgtcaggttctctcaaaatcttctttcttcaaatttgaatttcacatcattatttactactccacccttttctaacatctgctaattcttcctttcaattcccctacctttgcagggtagttttttttccccccagggaaattcacattctcctgttaataattcataaatgttgccagacacagatgaatgaaaccatttcccattcatgtcctgctttccagggatgctgtgagaattagttagatgacatctgcaattcacagcccgctctaagagaaacatgatatattcacatcacatttaacagaacattctttctatgcaaggcaaataactgctgccatacgcctgcttcaaatgggcccaacccctgcccctggggacctcttataaacccgtcacctgtagcagcttaactcttctttaggtgtgtacaattccactgaacagtagtgaatttctgattagcaatattgtcaaatgagtggtattctttcccccaaatttgaatctaacagggtgcccagacacttagtcaaatgtccctgtctcactatttctactctacccacctcctccctgcatttcatgacaggtggagatttcctttcctctggacaaagagaccggttccatggtggaccctgactcatccttgaacttttccagccgctgcagtattttcttaggcctgatcaccactttctgtttttatggaatttcaaccttagtatcaaactcatgccacaaaaatagaatttagctataataagaaactaggggctcagtggggtggctcacgcctttaatcccagtactttgggaggccgaggtgggaggatcacgaggtcagggattcaagaccagcctgaccaacatggtgaaaccccatctctactaaaaatacaaaaattagctgggtgtggtggtgcgcctgtaatcccagctactccggaggctgaggcaggagaatcacttgaccccgggaggcagaggttgcagtgagccgtgatcgcaccagactgggtgacagagtaagactctgtctcaaaaaaaaaaaaaaaaagaaagaagaagaaagaaaaagaaactaggtgtcagtggccattattcctacctgtgaagacttaaaacataaatttgatatttggatgagactggcctttaccataatattaataacatttgttcacagaaaatggcatagcattgaccacagtttgtaattagatagtatgtgattttctttctttcttttttttttttttcttaactatctgcctctcttgcatgctattgtacctataactctggactgagaggaaacaccttctagaaacaggcagtgcccagagagagaagcacaggtccacgcaggcagccaaagccatcttcttggttgaaagatactcttttcggggggaggagccaagatggccgagtaggaacagctccggtctacagctcccagcgtgagcgacaaagaagacgggtgatttctgcatttgcatctgaggtacccggttcatctcactagggagtgccagacagtgggcgcaggtcagtgggtgcgcgcaccgtgcgcaagccgaagcagggcgaggcattgcctcacctgggaagcgcaaggggtcagggagttccctttctgagtcaaagaaaggggtgacggacggcacctggaaaatcgggtcactcccacccgaataccgcgcttttccgacgggcttaaaaaacggcgcactgtgagattatatcccgcacctggctcggagggtcctacgcccacggagtctcgctgattgctagcagagcagtctgagatcaaactgcaaggcggcagcgaggctgggggaggggcacccgccattgcccaggcttgattaggtaaataaagcagccgggaagctccaactgggtggagcccaccacagctcaaggaggcctgcctgcctctgtaggctccacctctgggggcaggacacagacaaacaaaaagacagcagtaacctctgcagacttaaatgtccctgtctgacagctttgaagagagcagtggttctcccagcacgcagctggagatctgagaaggggcagactgcctccttaagtgggtccctgacccctgacccccgagcagcctaactgggaggcaccccccagcaggggcacactgacacctcacacagcagggtactccaacagacctgcagctgagggtcctctctgttagaaggaaaactaacaaacagaaaggacatccacaccaaaaacccatctgtacatcaccatcatcaaagaccaaaagtaaataaaaaccacaaagatggggaaaaaacagaacagaaaaacttgaaactctaaaaagcagagcgcctctcctcctccaaaggaacgcagttcctcaccagcaacggaacaaagctggatggagaatgactttgacgagctgagagaagaaggcttcagacgatcaaattactctgagctacgggaggacattcaaaccaaaggcaaagaagttgaaaactttgaaaaaaatttagaagaatgtataactagaataaccaatacagagaagtgcttaaaggcgctgatggagctgaaaaccaaggctcgagaactacgtgaagaatgcagaagcctcaggagccgatgcgatcaactggaagaaagggtatcagcgatggaagatgaaatgaatgaaatgaagcgagaagggaagtctagagaaaaaagaataaaaagaaatgagcaaagcctccaagaaatatgggactatgtgaaaagaccaaatctacgtctgattggtgtacctgaaagtgatgcggagaatggaaccaagttggaaaacactctgcaggatattatccaggagaacttccccaatctagcaaggcaggccaacgttcagattcaggaaatacagagaacgccacaaagatactcctcgagaagagcaactccgagacacataattgtcagattcaccaaagttgaaatgaaggaaaaaatgttaagggcagccagagagaaaggtcgggttaccctcaaagggaagcccatgagactaacagcgaatctctcggcagaaaccctacaagccagaagagagtgggggccaatattcaacactcttaaagaaaagaattttcaacccagaatttcatatccagccaaactaagcttcataagcgaaggagaaataaaatactttacagacaagcaaatgctgagagattttgtcaccaccagacctgccttacaagagctcctgaaggaagcacgaaacatggaaaggaacaaccggtaccagctgctgcaaaattatgccaaaatgtaaagaccatcgagactaggaagaaactccatcaactaacgagcaaaataaccagctaacatcataatgacaggatcaaattcacacataacaatattaactttaaatgtaaatggactaaatgctccaattaaaagacacagactggcaaattggataaagagtcaagacccatcagtgtgctatattcaggaaacccatctcacgtgcagagacacacataggctcaaaataaaaggatggaggaagatctaccaagccaatggaaaacaaaaaaaggcaggggttgcaatcctagtctctgatgaaacagactttaaaccaacaaagatcaaaagagacaaagaaggccattacataatggtaaagggatcaattcaacaagaagagctaactatcctaaatatatatgcacccaatacaggagcaccaagattcataaagcaagtcctgagtgacctacaaagagacttagactcccaaacattaataatgggagactttaacaccccactgtcaacattagacagatcaacgagacagaaagtcaacaaggatacccaggaattgaactcagctctgcaccaagcagacctaatagacatctacagaactctccaccccaaatcaacagaatatacatttttttcagcaccacaccacacctattccaaaattgaccacatactgggaagtaaagctctcctcagcaaatgtaaaagaacagaaattatagcaaactatctctcagaccacagtgcaatcaaactagaactcaggattaagaatctcactcaaaaccgctcaactacatggaaactgaacaacctgctcctgaatgactactgggtacataacgaaatgaaggcagaaataaagatgttctttgaaaccaacgagaacaaagacacaacataccagaatctctgggacgcattcaaagcagtgtgtagagggaaatttatagcactaagtgcccacaagagaaagcaggaaagatccaaaattgacaccctaacatcacaattgaaagaactagaaaagcaagagcaaacacattcaaaagctagcagaaggcaagaaataactaaaatcagagcagaactgaaggaaatagagacacaaaaaacccttcaaaaaattaatgaatccaggagctggttttttgaaaggatcaacaaaattgatagaccactagcaagactaataaagaaaaaaagagagaagaatcaaatagatgcaataaaaaatgataaaggggatatcaccatcgatcccacagaaatacaaactaccatcagggaatactacaaacacctctacgcaaataaactagaaaatctagaagaaatggataaattcctggacacatacactctcccaagactaaaccaggaagaagttaaatctctgaatagaccaataacaggagctgaaattgtggcaataatcaatagcttagcaatcaaaaagagtccaggaccagatggattcacagccgaattctaccagcggtacaaggaggaactggtaccattccttctgaaactattccaatcaatagaaaaagagggaatcctccctaactcattttatgaggccagcatcattctgataccaaagccaggcagagacacaacaaaaaaagagaattttagaccaatatccttgatgaacattgatgcaaaaatcctcaataaaatactggcaaaccgaatccagcagcacatcaaaaagcttatccaccatgatcaagtgggcttcatccctgggatgcaaggctggttcaatatacacaaatcaataaatgtaatccaacatataaacagagccagagacaaaaaccacatgattatctcaatagatgcagaaaaagcctttgacaaaattcaacaacccttcatgctaaaaactctcaataaattaggtattgatgggacgtatctcaaaataataagagctatctatgacaaacccacagccaatatcatactgaatgggcaaaaactggaagcattccctttgaaaactggcacaagacagggatgccctctctcaccactcctattcaacatagtgttggaagttctggccagggcaattaggcaggagaaggaaataaagggtattcaattaggaaaagaggaagtcaaattgtccctgtttgcagacgacatgattgtatatctagaaaaccccattgtctcagcccaaaatctccttaagctgataagcaacttcagcaaagtctcaggatacaaaatcaatgtacaaaaatcacaagcattcttatacaccaacaacagacaaacagagagccaaatcatgagtgaactcccattcacaattgcttcaaagagaataaaatacctaggaatccaacttacaagggatgtgaaggacctcttcaaggagaactacaaaccactgctcaaggaaataaaagaggatacaaacaaatggaagaacatgccatgctcatgggtaggaagaatcaatatcgtgaaaatggccatactgcccaaggtaatttacagattcaatgccatccccatcaagctaccaatggctttcttcacagaattggaaaaaactactttaaagttcatatggaaccaaaaaagagcccgcatcgccaagtcaatcctaagtcaaaagaacaaagctggaggcatcacactacctaacttcgaactatactacaaggctacagtaaccaaaacagcatggtactggtaccaaaacagatatatagaccaatggaacagaacagagccctcagaaataacaccgcatatctacaactatctgatctttgacaaacctgggaaaaacaagcaatggggaaaggattccctatttaataaatggtgctgggaaaactggctagccatatgtagaaagctgcaactggatcccttccttacaccttatacaaaaatcaattcaagatggattaaagacttaaacgttagacctaaaaccataaaaaccctagaagaagacctaggcattaccattcaggacataggcatgggcaaggacttcatgtctaaaacaccaaaagcaatggcaacaaaagacaaaattgacaaatgggatctaattaaactcaagagcttctgcacagcaaaagaaaccaccatcagagtgaacaggcaacctacaaaatgggagaaaattttcgcaacctactcatttgacaaagggctaatatccagaatctacaatgaactccaacaaatttacaagaaaaaaacaaacaaccccatcaaaaagtgggcgaaggacatgaacagacacttctcaaaagaagacatttatgcagccaaaaaacacatgaaaaaatactcatcatcactggccattagagaaatgcaaatcaaaaccacaatgagataccatctcacacccgttagaatggcaaccattaaaaactcaggaaacaacaggtgctggagaggatgtggagaaataggaacacttttacactgttggtgggactgtaaactagttcaaccattgtggaagtcagtgtggcgattcctcagggatctagaactggaaataccatttgacccagccatcccattactaggtatatacccaaaggactataaatcatgctgctataaagacacatgcacccgtatgtttattgcggcattattcacaatagcaaagacttggaaccaacccaaatgtccaacaatgatagactggattaagaaaatgtggcacatatacaccatggaatactatgcagccataaaaaaggatgagttcatgtcctttgtagggacatggatgaaattggaaatcattattctcagtaaactatcccaagaacaaaaaaccaaacaccgcatattctcactcataggtgggaactgaacaatgagatcacatggacacaggaaggggaatatcacactctggggactgttgtggggtggtaggaggggggagggatagcatcgggagatatacctaatgctagatgacgagttagtgggtgcagcgcaccagcatggcacatgtatacatatgtaactaacctgcacaatgtgcacatgtaccctaaaacttaaaagtataataaaaaataataataaaaaaaaaacaaaagaaaacaaaaaaaaaagaaagatacccttttcttccaacttaaataaaaggcataactagtttaagcaaggctattggcaggaatgcatcaccagctcaaagggcaggttttgatgccagccccaggactcagtagctgaaagttccacatcccacacacacaaccaggcagagagaggcttcccttccaggaaaatggcatttcggtgtcagtccctgcatattatgtccgttaatctctttccttcttttttctgctcttttaccctctttcctgacatggcaagtggtgccaatctttcttttttctgtttttcttcttttttttttttttttttttttgagacacagtctgcagtgactggatctctgctcattatagcctcaacctccccaggtgcaagtgatcctcccacctcagcaccccctgcccccacaccgagtagctgggactataggcatgcacaaccacgcctggctaattttcgtattttttgtagagattgggtttccccatgttgcccaggctggtctcgaactcctgagctcaagcgatctgccctcctcggcctcccaaagtgctggggttacaggcatgaaccaccgggctggccatctttttttctcttgtgtcagtcttgttctttgatggaaaagatgagagggattggaggggccttgaatgacagcctcatttggtgcattctcacaggtcacagttcaggcaactctaggaagtgaaacattctgagaactcttcccaaggagatatgctttattttgttttcccctgtaagtctccttgacttatttgctgtcaggaaatttgaactcttgatattataaatatggggaaaaatttctgttttgttttattttgtttgtttttattctgggcccactacacaatctcttagcaggtcattgtgtttttataaggaaaacctaagcctttgtctggcgatccttctctctgttcctgtgcaagaaggaggggccagaagttttctggccccagcaggaggcgtggcaggccgagcaacaagtcactatggcggacacatggcgactgcagagaggctgtcagtggagctatctgggcaagccctgaaggaattccaaaagggccctttatctccaaaacagtttaaggtgttgattttgtttccttcaaagcgtgacagtgtgggcaagctttcctcaataaagccatcagagcaggcgggaggaatccaattctcttgatgagattagaaatgtgattctcaagactgtggggcaggaagagggactttttcaagctacaagttggccagaatcacccagaatcactgcccttgaggagaaatgtcactgatgggaatacgttacatacatgatggtgaggaggtaaaaaagaagtgttgggaaccattagaatctgcagtgtgtgcatgtgtgtctgtgtgtgtgtgtgtctgtgtgtgtatgtgtgtttggcccatgagaaagattattcccagccctcagactttcctaaagtatgaacaacgttaagagatccaacttttgatttggatttgagattttcgatttaatgtgacatattaatgaaagcaatgtgtggtatttcacatcacagttttcttcagagtactgcaagattcagtcctagataagtcaggaggatacccaggaagctgaaagaaaaagggaccaaagatcaaaatgggggagaaacaaaaggacactactcccaaataagttatttaagtttgtgagacaaacaatactatttgggggaagtattaaaagccctgcaaaggcctacactctatgaaggcaaaatggctgccttcactctgctggccttcatggcactggaagaaagtccagcatgagtggaagtttctggaacccctcatggagctgggggtagggggagtgtgctgggtccatgggcaccgggtcactgaccacaattctgacctggtgcctaactgtcaagctattttatggcatagcggcattggatacacatttgggtgtagctaagttgtatttgtcatgaatattcattcaagtgaatagagaagcattccatagattgagctttacaccttagtgaggatcgataatattggtttgattttaaaagaacacattctcttatttaaattttttctatgtggtttctaaaaggtcaagtgtgtttttcataaaggtgagaatatattcctaagcaaaatgaaaaaaagttggagtataaatatgaaatccttaaaatctaagtatatggattataagattccacagaaaatttaaggtgaaggggggccactttttattggatgcttgctatatgccagaccaagtgctttacaaatattgttgatgaatgaatgaatgaatgatcctacatgatatttactaatatttctattttaccaatgaggaaactgaggctgttggagtttgtaagaagtcaccccatctgatagatgtcagaaatagaattcaaacccaaatatttctgactctgatttatgtaatgtaggagagatttagaatagagtgctggaaagaatcacatttaataaactccccccactgtcttgggccagttgatgaagacagcttttatttttctccttggagtccctaacttcccccactgagtgccaatctcctcatttcattttctcacgttactcatctcttttatccactcgattctggttgaaattagtggaatcttcatgctgaagagcttctaatgacatagagaacagggaatactaacccaatgttctgatcttttttaaaagcccagacagaaaataatattggccccagcggtcaaaacccagacaactctagttttgatgggatagctcccaaaaagttcagatgcttccctgaactcatccaaaccttgggcggtctcctgcttttccggagggaacatgcttggtgaatgatgcaccaagttgaaacacatggagaatgccctccgtggggactcttgggtcttgtatgaggttaagtcccaattgcacatcaagctgccgtggtatttctcctctgcaagcagactttgtcctgttgaaaatggaatctcaaccacacaaaaagcactggaagttacattagtgaagtcatcaaccatgtatgcacggtcttcgttttatgcatctaccttgcatcagatgctagcctacacacgtcacctgtgttatttcatttactctttgcaacaaaactgccaggtggttgttatctttacttaacaaatgaggaaaccaaggcctgggttgatcaagtaatgtactcaaagtcacatgacttgaaggtggcagtagggatttaagccaactctgttcatcttcaaaaagtgtgtttctaatcacgtcacagcgtctcctgaccagtccagaaagacaccagcaaatattaacatctgggagtgaatttgtaccctagctttatttccaattgatgacatcttttcttgtttacttcttaaagcagggatagaagcagtggagctggcaagcacccctggttcacatgtagcaaacatgggtgacgtggccaggctgctggacagaggttattggttcaggccaagtgatgggagttaataagctccaaggaaaagtaaaccctcagctgactggaacctctgagaaccctatcagaaaaaaaatttgacaagatagactaggattaaaattcatggatggctttagaactcagaaataaatcaggaagaaaaaaaatatatgtgcaagccaattccataaatactagaacctcgtagaatcattaaaagtccccataacttgggcctgagtgcaactgtggtcccttcactgtagtaatttaaactcgactgtttattttggcttctgccttctcaatgacttgttctaatcgaaatgctttgatgagatgcacaaaaggaataaaaatatgattgaaaagccagagagtaatatcttggtttaaaacaactgtgagcacaaactttaatctttggcattgccataagggctatcttagactaactggggcaaacacttttaggatcttgtttggaaaaacatttttggttttagagtgggtgtccatgtatcataacacaacacttacaaaacataattttttaaaaaagcctcttattctgcctacaatccatgtgcttttgacatcataagctccatttcttgaaggcttctataaaaatccatggcttatggaaggtaaaggcaacattatgctgagttcaagcaatatttgtgggacttgggttccactttttctataaagagccaatgtgtttttctcctgttttacctgaagcacctatgtggatctgcatgtctttagtcatcttggtggggtgcttacctgaattagatattatcttctggaagtcaataggaataataaataataaatgttaatattttttaagtcagatattctcaagaagaactggattcaaagcctggccaagctagttgaccacctgtgaggccatggacaagttccttatatctcaaatcactaattttcttacctacaaattggtggtagtaatgcattggtttgtacaaaggattcaatgagttaatatatgttgtattagtttgctactgctgccataacaaagtaccacagactgggtggcttaaaaaacaaaattcccttttctcatggttctggaggctggaatctgagatcaaagtgttggcaggattggtttcttctgaggcctctctccttggcttgtagacagccgccttctccctgtgttttcttatggtctcctctctgcgtgtatgtgtgtcctaatcttctcttcatatagggaaaccaagcatatttggattcagacccacccatacgacttcattttaccttaattacctctttaaagaccctatctccaaataaagtcacattctgaggtactaggcattaggacttcaacataggaattttgggaagggacacaacatatgaatcttgggaattcatcccatagcctataagaaatacctagaacatgctatacttttagtaaatgctgagtcccttctcttctccacttccaaggtttagtgtcaataagatatgaagcatgtacacaggctctttgaatttttcaggttccttgacaaaggtactaaattgcaggataatcccattaaaatgggatgtccattgttgctcacacaagggccagcagtttaaaaatggaggcaaactcggctgggtgtggtggctcacacctgtaatcccagcactttgggaggccaaggtgggtggatcatgaggtcaggagattgagaccatcctggctatggtgaaaccccatctctactaaaaatacaaaaaattagctgggcatggtggcgggcgcctgtagtaccagctactcgggaggctgaggcaggagaatggtgtgaacccgggagatggagcttgcagtgagccaagatggcgccactgcactccagcctgggcgacagagcgagactgtgtctcaaaaaataaataaataattgaggcaaactcatcttcactttacacctcaaaaagtgtaagtcaaaatataaagaggaaatttttaactccagacctctcagatctcattgatttttctcttgttcaaaggcaagcaaaaaaagtattgagcaatacacacaacaatgatgacaactacaatgacgtgacaagggtgatcatagcagctaacatttactgaggacaaacacagtcctttttgccttttaaaggaaagtcctttaagtgcattctcccatttgatctatcaacaactctacaaatggtagctgtgtgtgctttaaaacaagctgaaaatttttttagaaaaaaaacacacattgggaatttctacatgtaagaaaggataaaatcagtcttgatttcatgagaggactcaccagttcagattattattgtcactctaaatgtagttttgctgacataaatactatctgggtaccctaggggctgctgacatccacatttggaattgttgcatcttccggaacagagattccttggtaggtgtcaattgatctagagagcttggagggggcctgcttacaagtccttctctacctagcacactgctctgcataccatgaagatataataagtatttatagagtgaatgctgcaccttcccctccagactctgagttcccttctccctttagggtcatcacagccagcagctccgatggactcatagattaaacccctcctatggccaatcaaagacccccaagaacacactgttgaagatgagagggcccaccacttgggcccttggtaatttactctcaaatgctcggggattttgagcaagaatcttagtcacgtgaacatatctgtaaaacagttgttgggaaggcagaaagaccaaatgttgaaattctaaagtttttacttaatgacacttctacataccctttccaggagggaccgatgtggcagcttccactgataataatggaaacgcacattttgagacgttgcaagtcatggacatgcccaggccatggtgctgcctgttggacggtgctttgcttgtttctgtctgaagaggctggttgcctttttctcattcagctcaatgcaaacacccatcaagaagggtcaagtgggcattgctttcagagtctccttcaggcttgaacaaaggctttggagacagacaggcatgcaggggtgcacacagagagctgccctctggcacttcactctctggacatgctcaggcctgtgggcagggccttgagtttctggcctgccgtcaactccattgagcagcggccttggctgggtcatacacagcatttttttctgtctgaaggatgacctggttagcaaaggacaaatactagcactcccaaaaaataattaagtctttggacccttttctgcaaacacaaatctgtgtgaggttttctggagcaaatgctgtaggctacattccaaaggccaagaagaaaaataccacgctggtcagtcacccatgctgtctccataaatagcaccatgcatttctgaagcaatgagcgatgttagacaatcctctttatggtaccagtgggacagtggctttaagggccatggatatgacaaagaaaacaagggatggacagagggcgaaatcagtcagatcacagtatgttggttaagtcacttaattacgctggagctccattattctccgttttaaagttaggctggctcagtgtggtggctcacacctgtaatcccagcactttgggaggccaaggcaggaggatctcttgagcccaggagttcgagaccagcctggacaacaaagtgagaacctgcctctacaaaaaatttattttaaatagctgagtgtggtggtgtgcacctgtggtcccagctatttgggaggctaatgtgggaggatcgcttgagcccaggaagttgagggtgcagtgagccatgattgtgccactgcaacccaggctgggtgatacagtgagaccatgtctcaacaaataaaataaaaaggttcagctgatactgataactctgttccataaggtagtccacttaaccagagcccatttatcgagagcctgccatgtgcagagtcctgcataaaggctggtggtgagattgaatagaatcgtgtagtgaagacacagccaagctgctgcctcatcaaaggctctccctaaacgttgggtgactgtgggaagtggttggggaaagaggacacattaggcctgggttcttttaaaatgtggatattcgttcaggttctttaaatagttattgaaactattaaaaattactttcttccacaggaataatgattgagcaccagaaacagacaagcgaggtcctgggaatagagcataaacacaggaaaagcaaactccattctggcttggggggaccttgactaagctttgacaaatgtgcacagactcccaagaggatccaagccttcaaatccaggttcaaacaggtaaagagtggaggggcaaggtgccagttaagttgggggaaaggcgatgaaaggggcagattaatatattacaaggaaaactataggagaattcctgggaacaaactagcagacatgtttatcctgcaagaagcctgggtgatttgagcgtttggctggagggaggggaagaaggagctagcattaatcatgctcccaaattcaactccagcatctaacgaaatagacaataactggtttcgccactcctgttcctcacatcccctggggtcaaggcctggctggaattcaaacaggatttcagatcgggcctggaaagttgtgtacatttaagttcattctggaaggcatgcttgatatagaaatggatttttcttggtctaattttgagaggatctgaacttagtgagagtaagtgggtgctttaaataatctcctactctttttttcttaagaggagaatttatcgcagagactggccaatggcactgaccacacctatttcaagtcctagcttggaacatagattttttgtgtttttaatggaaaaatagaagtccttgtaaactaccatttacctttcatttgcctcttcctcatgttgtgtgatttcttttggcatcatagtgctcccctaaagggtccaccaaggtgaacttggctaggcagtgcttcaaaacaccccatcggtggagattaaggatgacaggtcaaaaccaatgccactcttgggctgcctggcatgcacctaggaaatcaggcacacccatgctgaaataaggaatcgactttgctcaggaagagtcatctatgcatttcttctttcggtgatatatgtagtaggggtcaagggtggggaccgaatttggagagagcaggagagaagggctggaggggtggatgagatggcagacaggggaagtaaactaagggtaaaccagaacatcccatgacaccagttatgaggagactcgctagtgctgaagtttctgctgtgccaaagacgcctgtttcaggatgagtccaattttagcccaggagaaataaatcaactatagggcaaaaggtttaatgagtaaaatgtatcattccaaaaatgtgatgcagtccacatccaaagtttctaggtcaaataacatgaggaactaatgcagaaaaagaaagcagctgcctgggcgtggtggcacgggtcccagcaccaggtcctcacaccacatccttgtaccacatcctcccaacctcctaccactggggtcctgcccagccaggaggcaatgggagggaaacccagccttgcaattctttaattttggggaaagtgaggtggggagtttctgacttgtatatcctttaattaaagggaatctgacctcttctatgatgataataataataaaatgtctcagaagagaatgggagcgtgcaagagagttatgcattatgcacaagacagcagggcttggaacagtaaaatcttgtttgctcacgcggctctgagtaacctaagggggaaaaaactcagaacattattgattagatgccaattcacatggctctctttgtctgctttttattatcagtatttctttaaaaggttaatagatcctggtcctgacaagcgtgaagccaggaggtgggctcttatccagtgttttcattcttcagccctcaagagacaatgattagatcttaatattgaatgcacaaaccacactcactgtgtgaactttctgagagagctccccacctaaagacagaagaagtgaagaagttttattggaaggattgtcaaaggcggggggcggggaacactttgagtctctttgagccagttgattaggggtgagttgattttcttatgaacactctaaatctactctccctgggggcagggaaacctgagaagcttggatttcaatgatttaattccccttctaagaatagccaaaactggggtggagagaagctaatgaagtcaaccacagaaagaacatttgcaaattgagcaaagccctgtgaatcttaggtaatagctgggagccgagtttctttcttccacatctcataaactacaaaataactcagcaaaacatgtcaaccaatggatgctctccacaggttacatgatctaaagctgagatacaagaagccaaacacaattaaaacgtgcttccattggtaggttcatggtgatgctttgcagaggtatcacctaacctaccaagctttggacatgctttattcattacaacactgtcaagattaagttgccacgacttcatatcccagttcatgaattgcatctacatacaccatataatgagcctcaccagtgtacggaatgtggacaggtcttcccttaatgctgggattaattagttagtctctggatgtgcccttgaggtttagcgattcacttcactccccagtgcagtgaatccaaaaagtacaagatcctttctccaaggaggagatgcaaattcacagatagcctgaagcctaaccttgggttagcccctgagatcgacccagttccttcttacagcaggatctccttgtgatggcttggcaggattgactgagctagtgcttccttccaatgtttgattggttaaataaagatatctttcaatgtttatataatagcattcagaacatagtctccagggtaactagtgagtagaaatggcaacatgtatgagtcggaatattaaaaaggaaatacacaaatcagtctttcatttcaagggtacatttgatgttgcatatcaatatcattttacatttgagggtgagcccaccctatgttccctgtgagctgtgagcaagagacaataatcacacccaatcccagtggaggctacaggtgagggggaggagcaaaaaccatataaaccggtcttttccattctgttaggaataagatgacatgaacagcttttcctgccacagtatctcaccaacagattagtttttaaagggaggttaaatctgtttgaaccttggcaaatttgttactataaccgtagcatagttgtacgtgaaaaccaaatattattgtcctttattattctgctttgtctcccatgtttttcccatggctcttaaaacaaaagtgctcagccaggttctcaccctttgtcactgaatggaatgcatatttttgaaggctgatatacagcttaaaaaggcagccgaatttatatgtgatttgaatagttggcaccgtcatgccaactactagcgctatctattcaaaaggcagcatcatttttcctaaggcctttcctatggtctgttttctagggcaagttgtctctccatggtgtctgctgccttctcatactcttggctgacttatattcattccctggacactcgggaacacactcccagagcagccagattcagagtcagtttgtccttcatagataggcagtaaaacattccaatgtagttcctctgagagggctagaatcgctcgagttctctcctgctagtttgtcaaaaaaactcctgggtggacgtttaacaccagcaacagtgccaaaaatggaatagtttctcgtaggaattatatatgcttattcttaaggccatgtaagtagacccaatgaaggcctactatcttcttcttggacatcaccacgggatggtgtgtgtgtgtatgtgtgtgagtgtgagtgtgtgtgtgacagagagagagacacaaagagagaaaacataggaatgccagatcctctcttgtctaatggacagtttttcaaaaggagcagtgagaattcctggggattcaccggtcagtctcttccagtgtttatcatctcacattactctcagaagtaacttgttaagagtaactcatctaagaacagaagttagttataccgagaaaaatattctagaccttgatgcctttcgtttttaatttccttgtgcgttttacttcccccagagtagataaaccgggggtgttcactaactgaagtcagaaacctctcaactcaaaatgtctgggaagtcctgtgttctgttagttccaatatacacgcatcagccataagggatgtctaaatagtgcaagacaataaaatcccttcatgttttctgttttagggaaatcctgcatggttgcactagggtcataaaaaattactaatgtgttttctcatggcgccgggccatcacatgggccctgtgcagtggtattgtatgcggcctgtaatcacaaacaaatgtattccacaagcagatgagctgttatatgagaaagtgtgagaggttagagcttgagccttcgtgtcagctacgaagcaggtccgccacagtggaagacccctgaggccatgcaaatgaaaatggcagttcctggggggggggtgggggtgggaggaggacgccaagagggatgaggtcactgcaataaacatccagcttccctctgaatgggaaactagaaaagccttcaactatggcactacgtggactaggaaaggaggtagaatttgtgggtcaggtggggcaaaaagtggaaatccccgtagagaggagacaagtgacatcagcgggtgtcccagaaggaggggtagctgaacagggagccagcaggcctggaggcagcctctatcagtgagggagatgggctgtctgcttctgccaacactcctgtgagatgtctagcgtgaggggacacacaagggggcaagttgtcagtatgacacccaggcttgccatcactgcaggcctcacttggaaggacatttataatactttccaggaccaagcatcattctgtccaggcaaaaagaaattccattaaaaagttgatgtattttgtctttgcccccgaaaaggaatgttcaagctataaacagtgacatttcttcatgtgagttcctgtaaaaaaaaaaaaaaaaaaaaaagaaagaaagaaagaaaaaaaaaagggaatgctttccagaattcttagaggtagaaaactactccatacaagcaatacggccaaatccaaaatgcatttacacagaagcagtgttgcagagtagaaatgcacagattaaaagccttcgctctcctgctccctgactgattttgagcaagttacttatggttcccaaaccccagcttccttctcaggaaacaagggtagtaatatctgccttaaggattgttgtaaaaataaatctcacaatttaatcgccacccttatgccaacaacttctaggtatttttctctctgctcacatttctctcctgagctctggatccatagactctctcccatgattctcaggctcttccaatcaaatgtccaaaaccagaatcatctttgcttcctccagcctcacagatctgttttctactcagctaaggtgccacatgcatcgccagaaaacttaggcatctccctaatatcttcttctccaacaccactctcacctcaaataaatcgccaaatccttttgattgcaactctttcaaattttctagctgtctccatccctagatcaggtgccatcatttcctcctagatcatcgcagcagtctctttgcctctcaccttggcttctcctcccagcctattctccacactccctccagaaagatctttggcaagagcgagtgggcttggtcctctccccagcttaaatggcttcccagtgccctcagggtatttcttaccctggcttgccaagctcttgtcagttcctttcttaccactctacctcctatctttagtctccacagctcctggcactttagttccctttagccacgtcggactttcttgacttgctcttatcttcggttctttgcagaggttgttctctctgcctgaaattggcttttttcctgctgtctcctctcctcttatctgactaattgctactcatgcttcaggtccaaatttagatatcacccctccagagcctttgtgcccacaaggctgaataggggtccctcttatgtcctgccacgataccttgtactctccctatcataagcacatggatgtcatcgtactgggcttgcccatggacctgccagtctcttccaattgagagcacactctttgaggacaagggttggcagcaatgtatcttcagtgacatgtgccagaccactcaataatcatgtgggaagggagggagagagggtgggagaaaggaataacatgacatgttaagcacctaacacagaatcagtcacatatcagcaattattagtctccactttatgttaataagccatacatgtctacttttcttaatcaggccccataattagttttttatgctcagcaaactggtgaagtcccttcagagctagatccgttatatctctacagtgagccaagtgtccccacggcaaaattgtcttagatttagtcccactgacaatgaatttaaagtatttaggaaaactttgctaaaatgtcctgaacacattggattaggggactggaattcggggtagggggttaatgcctttcctttaccctacttttctcttcctcttcttcctcctctttcttctttttctctcttaatcagagtcacagagaaatcctggaagagagagtgtttaagccaatttggaaaagtgtttctgctcctatgttcttgggatcttagaacacagaaggctctataagtttcagaaggctccagattagaggttgaaaccttaaaacttaaccccattcctctatgacatgactggggaaacctcccttctttctccaaaccttgctcatcccctccctaagagaaataacataactagaaaccaggacttgcctcatcactgttgagacgcccccattatttgctgcaagcaccgtgagtcagggcagagtgatcttgttcactgcacaacctcagcacagtgcctgggacagaagagctgctcagaaaacacctgttgaacaaatgtgtcaaaggaatgttccttcctctcctataggaactcctgggtgtaggaaaagtgggtatctcatttcatagaaggagatcaaatcagagaagttataggggccaggtcatggaaggccttggaagtcattgtaaagactttcgtctcttaccctgagtgagatggggactattggagagttttgtgcagagaagtgacatgagatgacataagtttaaaggatccgtgttatgggtagactttagaagtacaagggaagaagcagggatacagctattgcaatcatcctggaaggaatcatggtggtctggccagggtagaagcagtggaggtaataagaggggacatattccagatatatttcaaaggaagcaccaacaaaatttcctgacagatgggatgtggtgtgtaagagaaaaagaggagtcaaagatgactctaagtgttttagccagaacatctggaagcaagagttgccatttcttgaggtggatcacaaacagatttgaagaaaggatgaggaacttggtttggccttcaatgttaggtgattgagaagataaagaagaaccagtaaaggaaaacaagaacagccagtgaggcaggaggaaagccaagtgagtgtgatgacccagaggtcaagtaaagaaagggctttagaggaaacagattgatcaagtagagcaactgttcagagaattcaactaagatgaggcctgagactgacctctggatttatcaatggaggacactggtgaccctgacaatcccagtgctcttgatcactcagtataatatttcaagcaagaaaagaaaagtaagttgcctagaattccatttctagaaattaggaaatacagtcattgtcaaaaggttgccatctgttaggtaagtcctctcaacagtcatggtgtgacattggccccatctcacctcctggctgaaccactgctcatgaattatagttccagtttgttagtgagttcagggaaagagtccatgatgtaaccttcatcgtgtaaccttgaaccagtgcccaaaatgacttagatttctcactatgaaaataaatataatggtcaccactaaactaaaatatcaaaacttgataaatgctggcccgagagaacaatgctggcattggatttgctgaaaaggaaagccacattccacaactacctttaagtctgtggaaatggaaattttttaaatacagaaaaagaaaaactaccgacccacatgcaaagggtggattaggtggtttccacatagttagtgaggttctgttaccttagcgaagttctggtaagaatgggcattcctcaccagcataatcacttgccactctttggaattcaggaagtgtttcacagcaaatggataaatgaaatgagtcagtgaacaggattcattagttgcctttccatagccttccctgactaatctaaccgcatactaatcattgcttcttgtttctctgaccctaccaactcaactctaagttccttgagaactatataataagatgtatttctttgtgttcctcaccacacttagtttagtattatagttattacttaatatatacttcttgactgagcaaaaaatttaaaaaagaaattgagctgttaagctaaggatataaatttaatttaaatcttcaagaaaaagagataagagaaacagtgcaaataagccttacaatgtgctcagattataatggtctgcaggattaaaccaactggagccaacattcctctgatgttttggtatccaatggtcttatcagtaggtttccaaccattaatcgtgagccattatttactgttgccagtcactgccttctggtgtccctagtgatacaaccttaaccttccaagggccctgtgtcacttttgtgtgatgttttcatcacacaaagggaagacagctgttttcttggtcgcactacttcgtggtgtcccaatgagatgatgggactatgtagctctctacacatgaactgactccatatgcattcccacgggggatcttagcttgctttctctctttctttttctttcaacaaaaaaggttaagtttttgtcattgcttacatcagtaacaaaaaacaaatagacaaactttgaaaggattgaggatggtcaaccctagtcaaagattgtctagctcatgttatttattcacattcatgatatgagtttattatatccatgctcttcagtaatggcattgataataggaaggttgatttggaaaagcaaaatgttaaacactaacctgagaaataatctgtgatcttttcttctctccaaattagtaaaacaaacactgtgagctttaaaataatagaggtgtgtacttggaaatagtggattgctcttttccgttttcccagctgccatgctatggctaacatgatactcgaggttgtagcagaacttccaaagtaaacttgatctttagagttttacaacaatgatgggtgaacttcagaaagttcagagatttttctgtccaaatggagaaataacattcttgtgccagttttctgtatctctgaattatttagttgaagttttcacaacaatggcaatttcttgaccgtttcatgctggtgacaggaaattacacaagtagagtaagttttctcaacacccattcatcagttagcaacaattcattgtagtttctactgtttagcctgagtctagatgcaaatgttgaaaatgagggatatggtgttcaggttttcaaagtgagatatggaagcccactctttatagatctgccttgtatcttgatacaactttttggtctctgtctttgagggaagccatcctttagacacactcctaggttgtcagctatgccaccaatgagaagggcagattatctcaaccagggtttatcaacaaatgaaggacaattttctattcttatcctttacaattctagaaaaagcaaaaagcaagacaaaacaaaagatgtcacccaaagatgttttcagtacaacggaatcaaactctaaaataagatgtaaaaggccaagcataaagttggacagtgatggtcttccagatattcagttacactatcaggccctcagagcaatgatctcaatttattttgttggacaatttatcattcacagcacactggcccatttacaccaaaggaggagagatcaggcattgcacacccaccacacaaccacccaagttgcaaactgcagagccagggcttgaatcgtgatttcggcttctaaatccatatcgttacactgcctatggggtgaaatcttcagttatatagataatttttttttatttttcaaaatatttttcaagatattgttgaattgtaaaagcatcacttgtgcctaggttcaaatcctggcatagccacttatatcagtgggcaagtagtgtgatctctttaaacatcagtgtcctcaactataaaaagacagtaataattctaccttcttaaggttgttgtaagaattaaatagaataattcatgcaaagcatggaacctagtaagtgcttgacagaatgtggctttaattgttgataataaaaatgatctatgttcattgtagaaaatgtatccaagtattaagaagaaaatatctctcataaatctaccatcctgatacaatcccttaaccattacagcagattttcaatttttctaggtaatgctgcataatgcatttctttgttatgaagattttcaaacacacaaaagttaaaaggcaagtgcaatgactacacatgtattttcctcctagagtcaataattatatatactttgccatatttgctctgtgtgtgcgtatgtgtttagattttgctgtttcgtgtccttatgcattacctgtgttggatcttcctcagtactacttccaattagaaaatccagggagtcggtaagcagacatacatatatacatatgtgtttttttgctgaaatatttgaaagtaaactgcaattatcgtagcatttcacttataaatatttcaatatgcatctcctaaaaataagaacatcctcccacataatcataatatcattatcgcaagaggatattcacgattattcgctaacgtcatttaatatccagttgatatttaaattttttaaattgtcccccaatgactttttgctgtttattttcaaactatttcatgcattgtcttttgttatgcctctttgatcctagaacggtcttctcaccagttttacattactctaagtatactttttaatgatgcatacattccagtgtaggcacagtcgtggccagtccctcagcttagacatacaaatggtttccttcttccctatgatgaatcgtgctaagatgaataccttagtgcattgacttctttcaccttttctggttacttctgaatatttacattttttaaaaagataagaaaatatttaaaacccttcttagatattagcagactactttccagaagggttttatccactgctatccccccaaagtatttgagcatgccaggatagctggggctttcaaagcctccttgtcctgaggagtcctggtttaaatgccacattctccggaggacattttctggtctacactgggcgagttcccttgccatgcattgtttcttgtgattacttaattatcagctcctcccctctaagaacaaggaatctttacttgaagaggccagtttttctctgaaattgggagctcaatgaagctggttgattgcttttagtattatgccaatattaaaaaaaatttaacataaaacttctggctcttttaattttcaccaaaacaatactttatgattaaatattaccctatgtacattaaatattgccataactttaaaactgatgggactctattcctaagggaacctttggaaaattcttattttaaaataaaataacccaaataaccaataatatgtgagtggttaagtaagtgttgcaaatctacatgatagtacagtctgtacacattaaaatttatattcataaagggtttattataacatgaagaagtgcttgttaaatgatatgggtgaaataactgttagaaatttagaatgctaaatatgccacaaaaaggctaacaagatacagcaactgctgtactatgggtgatcaaaatagcttttctcatgtattttttttctttctgaccaaagcacagtaagaaagatggagctttgaaaagcattatttaagcatccacagcccctgtttacaaaactataaaagagaaaaaaaatgtttactcatggtaatttctttcttttctatctgattttgtagcatgaatttaatgttaatgctactttaatatataaagaatctggcaaaaatcaaccaactagccagaaaacaaacaaataaataaatatttcataatcttccatttccttctgaagattttcaggtatattctatcacaagagcatttatgattattccatttttaaaatttacagtccccttgacaaaatttatcaacacctctatttgatctgatgatacacatcagttgccaggtacataacaaacagcaagctgtttcactgtcttcatcttgagctgtaattaaagagtatttactaagcattacttgaacccaacattatacctggtattatagcagctggcactgtggacccgggccccgagctacagaaccttacagctgatgacctgtgatcaacatactcatctttcctctaaccacatgacaaacctcctggacccagagccaaaggaatttatggttttccagggaaacatgatatttgctttgacagtttcacatagctttatcccaaaggcagacaaagagctgaagtttcatcttcactcgcctttcctgggatcaagccctttgatggaaggagatcactgggaatccatccctaggcctggaggtgtcagaggcagaaaccagacatacatatcctgctctttggtcctctgggaaaatacctagccatcactgccctcatccaccagtctcatgttgcccgcctgtctccagtgttagcataagtgctgactccccagcactgtgtgtgtctgggagggcaagaggagtggcaaacagccagctggtgacgcctgcccagagccctggcagacctcattaggctcggactggtctctgaaatgctctaccactgctcctgcctggcacccaaacccctaccattttaaagtgagcttttcacattccattcttcccccaagtcctgcaacgtagggcctgcttttctcacagctccaacatcaacacttcttttgagcaaaacttttgcatgcaatagatagtgctagtgccaatgcatcttagccagcttctacagtcaaagtgaaacaaagaaaggaaacattacaaaaatcggtgttgtggaatggaaccagacaaaatcagtaatagtcagtgtgcccctttgatgacctaaatgtttagcacctcaaaggatttctaaaggtgtcatgcacagagttttgagagggagctggcattttcagccaaaagctgagggatcctctgaaacagataccgtcaaatatgcagacaggttgccatgaggcaaaatgggaagacgtatctggctgtgcataccaaataccatctcagagtggggttgtgacttgtaggatagacatgaatatgatgcacccagcatggccatgcgtgggagctcctccgtcaggaaacgtggtgtgttagataaactggaagagattcagagaggctggaaattgggggcaggagggggatggttaaggcggtaaaggcggttttttaaaagacaggaaaaaagggttaagcaaggaaactccataaggacctcataggccctgtggaagagtcaaaagtcatttaagtgttaagcaggcttgttgcataattggattcacgctttagaaaagttactcttgctgaagcacgaagaatgaattgaaggggggcaaagcagaggtagaaagaccagttacaacatctaagtgaaggataacagtcgacaatgagacacatcaatggatttgggaggtgtttaggagtagaatttgtaagacttagtgattgcctaaggggatgtggtgaggggaacaatgaaggaagaagaagaacctctaatgactgccagagtttggctgaggctttcaagggaatggcaacaccacccaatgcgggaacaggagaggcacatgagggatgatacgcatcaattcaggttttggtggattgggttaaaaatatctttgcaagatctttactaggtagctggagagataccattgaagacctgttctatgtataaaatctggagtggccagcacagacagtaatgaagctgaaggcatgttgtgggtgaaaggggtgtctaataaatagggacggaaggacacttgagtgtttgaatactctgttcatttttggcagcttattgcgaattcatgtaacaatccttcctaagagcaagttctggaggaaggaagtatgaatcgctgagtttaaggatggggggtgggggtgcaaaaataatcaaagtggagaaataattctcagagttaccttcattattgagtacttactatgtgctaggccctgtaccgagtacttaatatacattgttctactgtatttcatttaattcttacaacaagcctacataaagtagatactattatctccactttatgttaacaagagctgaagtttggagattctattactctctatccctgttgtttaatctgatagccgctagctgcaagtggctgttaggaatttaaaatgggcaacaaagaaacttaattttttatttaactccaaattctcatttaattcaaattttattttatttcacattagtgtaaattcacacttaagaactaacactggattcagttattgaaaaatgcttaaatatttttggaacaatgtgagtatgtgaatcaattttttcaactctaagttttatgaaatgtaactacagatcaagtatttccaatgaaaaatttgtgtctgaattgagatgtgttgtgagtgtaatttttcgaagattcactgtgaaaaaatatatgaaatatctcatttataatttttatattgattacatattgaaataatgttttgaatatatcagattaaaaatatattgttaaaattaatttcacctgttttaccttttcactttcttttatgtgactactggacatttttcaattccctaagggaattgagttccccggggctgacggggagcacggcctgggcagccctttcccgaggatgtcccagtggagacgggctcacaccgaggtgcgcgcacatgcgcgtctgcgcggtccgccgcgggtggaccgaatctcaccccgtgcccacgaccggcgggctttcctgtttgcctttttgaactctgttttctttgagtcttggagagagccaggggctgtgatgtcactgtataaacagagggaagggtgggggcgaaagttgcattggagcgaacccggcggtggaggagggctggtgggaggatgggggtggggagggagattttttttttaaaagtggtttggtctcgggggtgtaggggcagcgggggactctgcagagtcccgataaagaaacagaatgggactgccagtccctaacctaggggcggggagggggacgtggctggaagagacaggggttggtggggggaggttggaaaaatatgggacgcctagagctaattcctctgattaaaaatgcattagtttggaggtgtcagggacacgcagctgttttcaaggaaagcctggctccaagaggtcctccccggccgggccgcctggcggctccatcccgggtgggtgtcagcgagcgcgcagcccccgacgcttgtcctctccctgacagggccctggccaatgtcctgctgctgcgggtcgtggtaatttacatcctctctgtgtacattaacttatctgcagccgcgctggctgcgctccttcagtcagcctgtctcctgcgcagcctgggagccttccccgacccagcgacccaccgggcggccgggggcgactggggaaccctgggaatcacaacaaccgcccggttccgacccggcccggacgcccgcgggggcgggggactctgtggggccaggcgtggagggccggcgagcccggctcgggcagggcagaggcgggcggccgggggctggcggcgaacacttagtggctaattcatgactcatgactcatgcgcaggctcctcttcagtgacagccgggacagttcctggttatttgtagccccccggctttcatttcgctgtaattaagcagtcatttgagggtcatttcatccccgttataggtttctctgttttaatcatgctttgagttccagtgggggcagcagggagtggaaggggaggttgggaaggaggcgtggagggcaagagggtaatcgtctctgagaacgcgtgcacttttcataactcttcccgtgacaggccctggtgcaggctccgcagacgccgacgcccggcgctccgctccggggcgcgggccagatcctcttccctgacacccgcggtcttccctgagaagaggtctggccctttttgagtcagatgttggattttctgctttcccctctggcaccacactaatcattctctttaatcgctgtagctttttaatgaggccaagtaggtatttatggagccgtctactctccaaacgctgatgcttgataagtcatttataacttatcggtgggctttgcataggccaaacccagaagaaaggaagtgagaataaaatagaggctggattttacgaggaaccttcagcgtatcttcaggtcctagatggtaccaagcccttgtgggaaatgttcaatccatcagacataagaataagaaacggccacagcctgtccgaattttgtgaaaattctctggctgtcattcttgatttttttttttttaattccctccactttctcctttggctggttcatgtattctttagatatcatttgaagcttccattccaaggccaagtctaagatgttctttaaagaaatcttaagctattgcatttggagggcacacagattgaaactgaaaggactggaaagaaataaaggacagaaaccagattttctgtcattgcaaagagtaggtgccacaggctccaaatctcagtagatattaaagttaaagcaggagtctgcggtaacagtaggagggtggttgctttcaaaagagaagggaagagagaaaacctgtccaagaaagggcaggagaaagagtgagagagaaacaacacagactagaaaaacaaaatgaatgaatcaatcaacatatgagtatttaatgtgcattaaggaaacttcaaaaatgttttcagccataaaatggaataaaatactgatacatgctataaccatggatgagccttgagaactttaaactaggtgagagaagccacttataaaagaccacatattctataattccatttagatgaaacgtccagaacaggcaactctatagagacgggaagtagattagctgttaccttgaactgggggtgggggtaggagtaaggggactgggggagcgactgctagaattaattgtgatggtgattgtacaactctgaatatgctaataaccacagacttacatgctttaaatgggtgaattgtatagtatgtgaattatatctcaataaatctgttactgaaaacagtttccgttaagttaaatagaagcaggtcccaaaacagcaccactaaaaaattctcttgctaagtgcactgctccttcctatatgacaatgtaaacagcaaatactgttcctaggacggggtctggtttttcacttggtccccagtgcctagaacaatgctgcttatggaaggtacacaacaaatatttgctggaagagaacttgcaaataaccagatggccaaattcagacttataccacgctcaccctgccatctcttcgctgcaccctctagctttccaatattatcattttatatatataaaatatacaaatatatattattatatatacaaatgtatattattatatatagtatcattattattattaatacagctagtactaataactaacaaacaacattttgtttatatattttgtgccaggcactgtacatatatttgcttctaatccttataaaacccagcaatgtaaacccactgaacccaggtctgtctggctcccaaagttttagtctattataaacaccgcctgctaaaaacactaaacacaaaggcaaggagaaacatcaacgaacatgcaaaagagaaccagccaaagtcaccgacagaggaaaccaaagaaaatctggtttctatgtttattttagttttaatttttatttttttgagacagagtctcgctgttacccaggctggagtgcagtggtgtgatcatgatttctatgtttaagctgaaagaagtatcaagaagcatcactcaaacacatcactcaaagaacgatggcttgtcttatttaaaattatatcactcatagaactatggcttgtcttatttaaaattacgataattttatactaaccatggattatatatgcaacagctacggaggacttactatgtacatagttcacaggagcttatgttcgagcctgttataaaagctactgtctcttaaaaaaaaaacaaaaatgagtgctcagtatatttgtctaagtagtgaacaaaaggtttaaccgtacagtaatggaaacattctggtttcccaaaacctcttcctaaagctgaaacatttttgtggaaagttaaggaaaagacccagaactctatgaagggctgcctaaatgactacccacaaaagtagctggggagaaatacaaattagaatacatccaaactattcgaaagctactgtggtgtgtgcttgggcttgagcctgctgcctaggtgttcattaagtgttcataatatttcttatgtccataatccaagattccagacccacatcccaaccaagactcagacccgccatcttatctcatgcatattagttggtatatattgatactacttgtaataattatcctagaaagacacaaaaaccttctaataaaaggttctatattcctctatctactttgctatcagaattttgctctaagatttataatgaatagcccccattttcaagttggaaaaaccaagtaccccctgaaagtacttactgaaactgtcccaaagatccataatagtaataggaaaaaatctcagcatgtccttctcccaactgttagagatactcacctcctatttaatgtgataggaggtgttccttctacttacaaaaaattcgtatatatatttaattttttcttaactaagtctgaaaaggagagacaacctaggccataagtatggaaaagatgtatagtttccctctctcctttttatgggcgactccaaagtgaaagtccaaccacttaggcggatgagcttcaagaaactcttctcaggactgtggaatgtgcactgtgtctacagtcatccatccctaagcatatgtggttgtcaccctctagtggatgatctatgataatagttggcagcctcctgtggggcacaagcacgatattatccaagactcacctatctttaagacgtaaatgacagataagactgcaccacaactcttcagtcttggacacatatttcctaggaaaatgggtgcgcacgtgctgtttattcagtctgccattccctgcttcttttgagtctgtgtttgtgtttcctactggtgtctggcattttcaagaacaatacacatttccttgaggcagacttctcctaccattgagatagtcctaggcaattgattcccagatattgtttgtatccagactggtcttgaaagctttctctatctgcaggtctactgggtgtacccaactatttagctggtaaccaggcacttgccagtagaatgccagttctgtgttgaacaatttgatctacctaggaaagttgtggacgataaatattgtttccatgtttgccgctgtgtaaggagcctaaacatagattcttagagactctgatagaatttttagaggtggaaatgatagggtttgcattaccttaaattttcaagactcaacaccaagcattagattggaaaatagaactttttacaaaagccctctaaaatgaagtctggctttgaattcattagtattactagattcaaaatataatcacatgattttcttctctccattttattaggtaactgaagatttacatctgtaaatctggatgggaactgaattcctacatcatagacagtttcaaggagggaaggattatgtgttcaggaaatactctgcattctcaaaactctacattgttggtgcttagatttgctctgtgagaacctactgaaataaaccttttctctggaagacaagtacagtttcccgaagatctgtttatttgccagcagaggagttgaatatttgaagccaagccaccttggttctaaatctgtggttaaatggaaatcagagcactgagatatgcggtgcccctccccactcttactcatttgaaagatgaagaaactgaggcttggcaaggttgagtggagttcacatagctagctaaccacagagctggcaccaaacaggagcccagctctccaactcctaggcccttgcctctcaggtggaattttcttagtgattaggagaaaatcagttccctagccctgttcacaagagtttatattctgtttggttaaaaagcatttttcttgttgtaagaaataagtaacataaaatttaccattttaacttttttttttttccccatagagtctcgctctgtcacccaggctggaatgatgcagtggcgagctctcaactcactgcaacttccacctcctgggttccagcaattctcctgcctcagcctcccaagtagctgggactacaggtacgcgccacagcgcccaactaatttttgcattttgtagtagagacggggtttcaccatattggccaggctggtctcaaactcctgacctcatgatccgcccacttttgcctcccaaagtactgggattacaggcgtgagccactgtgcctggcccattttaagtgttttaagtgtacaattttgtggcattaagtacattcacataattgagcaactatccccagcatctatttccagaactttaaaaaatcttcccaaacaaactctgtctccactatctaataatttctcattctcccctaccctcagcccctggcaactactattctactttttgcctttacgaatttgaccactgtaggtgcctcatataagtggaatcaaacactatttgcccctttgttactggcatgtttcacttagcatattttcaaggttaatccatgttgcagcatgtcagaatttccttcattttaaacgctaaataatattcctgtgtttgtctgtgtgtgtgtgtgtgtgtgtgtgtgtgtgtgtgtattacactttgttttgtttgtccattcatccgtcaatagatacttgggaaaaatattttttaaatgcacaataaaaataaatataaatatgtaagaagtaaaagcatctctgcaagaggcttgaggctatatttgtttaaaaaagactgctgggaattgctggagtaattaaagagtaatttaataattttacacagaactattttaaattgaaactgtgagctttggtttacttacctttatattctctaccacctcccatggcatcctagcatcagcacagggtcacatgtggtaggtactcaataaatatatgctaaatttccaagtcatgcataggaaaaatcaaaggcaatctatattatcattgtttttccttttttgttaattttatttactacacagtgaactgattactacagtcaagctaattaacatatccatctcttcacttagttactgcgtatatacgtgtggtccgggggagggagggagagaacatttgaagatctactccctttgccaattgcaagtatgcaatacagtattatcaaccacagtcaccaggctgtacattaaatctctggcagtattcatcctgcataactgaaactttgtgtcctttgggcaacgtttcttcagttcccctccacttctgctcccagtaactacctttctgctctgcttccatgaattcgacttttctagattccacatagcaagttcatgtcatgatttttcttaatcattccagaggaagatgatctgcttctgtgattattccagaggaagatgcaaaagttcctggcaaaaatcttatatatagaaagaacgttctcctggaagaacaacgtattagccaaggttcttaatttcaaataatggaactaattctaattcaaaagaccaagcccaaaaagagttgactgaaaaaatattgcatctctcatggaattgctaaatgtctggagaaccaggcttgaggattccagaaacaatgtccaaaaccatgtccaaaactgatccgaggaggaaaacaccaaaggttatgccaatgccaagcagtgggggctcctctttgctcagctgccaggacataactgcaccaaacaaccatcctgccacttctacccaggagcccaactttccaaccctggtgtcctggatgcctagaataccacctcaacaaccaaactgattccatagagcccctccctcaaacagtaacacaagtcacatttaagtatagtgattggtggggtgtgggtcacatgcctgtgtccagctacaaggtggctgggaagaaagttccctattttctcactaagagatgtggggcacgtaaggaagatgatttcttgcatataaaaagggtgttcaaaaagtactgggcagccactactgaaggtaaaaggactatgttttccctaagaattatcaggcagaagaacagataaaatcctagctggaataattcgaatagtgattatttttaaacactattaacacctaagtggcaaaagcagaataatatggcaagtgttccagttcagcccacattgccactgtaaacttacaaagcatcactggagagcttctccctctagaaacggatttagacttgataaggaaaaccagagctcaattagcaataattgatagcagctgaaatgttcaaggaaagctctgtaccttgtacttagatgtttgaattactgtttttgcaccaattcttgtgcttttcttctacattttgatagtgaaagttaaatactatatattgcaattttaaagtatatatatattggcaaagcaaaagatataggtcatgtgttagaacctttattttctgttttcacattttattaatggacatgtatatactcagcttaacatcaccaggcaaaacagatctattcctggaaagaaatctctacagggctagagttgctggctctggcttattggagatggccagcatgaaggcagtcacatgcgtcatcttagaacaaagcctggaatcagatatcagagtcagaagaacctagcttcatctgaaaatggtttttctcccagaaagacctcagatgggccagtttctcagtttcacaggttgtcatgattacaaagaaaagaaaaggaaaataaccaaattttatgaaaacccatttcagaggactatcaggaaattccgtttgtgatagttaaaagtcaacagcttatcccagatcaagcaagtctgcctgttgagagatgtgtgcaattaactaacatttttccccttgtagtagacttgatttcttcaactacatatgatctatgttttaaaaagaggattcattaaaaacactaaagttgatggagaaaaaaatttggtctatatagcaaacattccttgtataatgtttcacaaaattaacaggtttggttcattaaaaaacgctatttgacacaacttttcttcatttaagtggctaaaagcactatatacatttttcttaagatccatagatctaatttattagctctataatctaataaatgcactgtgaagaaagaaaagaatggtaagttttattggctcaatgtagaaaataaaaatcataggctggaatagaataatgttgagcctgaagttaatcttccagacaatctaatctaggcttgacaaatacatggagtcaggataggcactttcttagttactgtttaaggcagacataactaatcaatctccagacataactaatcaatctcagcaatttctaattgaacacagacatatacagtctcataattcttcttaaaacagagctctgggtagcctctaccattcactgaagttggtgcatgtaaagaaactatttgctatagctggtattctcactcctttaatatatatgcatgtggaggatgaaaagcatgcagtgacctacttgatcattgtcacccagctagtaaatgaaagcattagcgttataaccctgattatctttgcatgaccccagtcaaactcgtaaagttatggcatgtgtgacattcagctgattgcaattgagtacctgcaattccaagtttagcaattatgatgctcctggaaagagtttctattaccaactttataatttccattgagaaagaagtgaaataaggaaaacattcttatggcttatggttatgtatgagttcctttattgttcataaaggagattatctttattcataatttaaaggagaatgttaaaacatttactgcatacaaaattattattaggctatggctgctatttaaatgtaatgcccttagaaacagggaataaaatataaagagattgaggcaaaagagctcttttgcattaaatcttgtttgttacaacaaaaattcacaatataccacaagtgcagtttataactatttaccttcatattaaagtgatgatgacagtaagagtctttggatttaataatgtcttactccacctattaagacagtgtaattatctagttttaagtttgatataatatccatagatattatagcgatggatatatatccatcactctgttcaactcatgagtaaaagcaaaacacagaaattaggtgcctgctagtaaaagtctccaaaagaaaaaaagtagaaaccactcttggttgatagtcatttattcaccttatgtcaatgaagacttctactaacacatgatgtttctagactttcttctttcaaatatagctttaaaacaatttttgtcactataattcacacacattatttaaaaatcagattgtgctaagaagcttttaataaaaaacagcagctactccattctccctcccctttacacacactcgcgtgcacacacacacagagacactgtttctctctctctctctctaaaaccctgaaggcaaccactttcaacttttttagctgtttattttgatatttacttctgtatttctaatgaacatacttatattacttgatttatctatttggacattatctgttatggtgaacaacatttcagttcttctacataccccttttcctttcctttctactacctcaattttttgttcactccctaatcaacgttcattattatgactatgaacatgttgtttcctatattgctgggctttccagcaaagtcgtgttttatgatttaatttttcttgcaaagctttttgtttttcttggagttaatagttgtctcgtattctcattcacttaggggtctgttttttttttcacccctgccaaatcttttcacacaccccaacagttttgtaaagggcctctcaatacaattttccagagtcaaatctagaaattgttctgtcagtttcattttgtttttctggagtcatcccttatccacctgcttcagtttgcctagctgctctgtaggtctcctgcacagctattgtcctggtatttcccctggcacctccgcggtattagatcccttctttccaggattccacatcttctcttttcttggcatactctcttctcttttctttgcatactcccttatattcccttggtgtcgcatcctttgagagcttcctgagaaaaaaaatgcatgggacataactttttctgagactttccatatctgaaaatatctttattcaaccctcaaagttgattgatagtttcactgggtatcaaatttaagttaaaatattatttttattgagaacatgaagtcattgctcattgtcttccagctttcagtggtgcaaatggaaaggtcactgcccttattcctgatgttttgcagatgatgctttactctatctttggaaatgtttagaatattattttattccctgtattccaagtttcaaaatgatgtgccatagcatgagtcttctcttaattcactggtttgacacttggaaggctccggttgcttagttattaaaaaaatgtatatagagataatttgcacctgttttgtttctttccataatgctcattagtatggtattgaattgattctttaattttctcatcttttcccttttgtttttcatctctgtgtttttattctactttctggaagagttccttcactttgtctctgaccttttaacggaatattttatttctgctatcatatttttaattgactacaactcttgttctttttatatctccctcatctgtttcatggataccatgtctctgagagtattatagtttgcttttaagaagttttcttctcctcttgcaatgtctgtctccttcaagctcctttgctttcctgtgtattttggacactgtctttcctggtgcaggcttccctcaatgccatttgttgctagctgtctaattctatttaagaatgaggcactgaacacctgactgagacctctgtgggaagcagtgcctcgctgtggaatgactgggcatcactgcattgtggtcaggtactcccatgcaactgtaccttcacatccctcctgcaggtggttcaaggtacccgaagaaggctattccaaggtcttagctgtgggtgaaggcctggccacgttctgagatggtgggaaagaggactggggtggtgtactcttcgttcctagctttcctttccctcagcccatctctacctgctttgtgccaattggccacaaattcagagctttctgattcaatctcttcagggcctaaactcctgtctcctgttgagggtggggtgggtgcattcagctgactgcatcaattgatggaaacaattctggggtctatagttctatatgaacttttaagggacctcccatttttagcatccatccctgaacttttgctagaacctggtgccctattccccagaccttccctaggttctgtggagtgaattgcctcatctactaagtgtagccctctgcagacagtttgtgctcctgtctctctctcttctttgttctatggctcaggactacagaggttctgggtaccattagaaatggagtgtatgcatgtttcttgctgtggttgctgttggtcgataacttttgcataaagaatgaaaaagttgttatttggccatcttgaaagaggaagtcttgaacacttgttggtgttggctagagggatattcagtggcaagttgctgagcatcctgaatcagtttgctgggactgcctcaacaaagtaccacacaactgtgtgttccaaacagaaatgtaatggctcatggttctggaggacagaagtctgaaaccaagatatcctcaggttactttcttctgagagcagtgagggaggatctgttctctcctggcttctagtggtttgctggcagtctttggtgtttcttggcttctgctgcatcactctgatctctgccttcatcttcacacagccttctccctgtgggcatgtctaagtttccctttttaataaggacaccagtcatattggattaggggtccaacatacttcagtattacctcatcttgactgattacatctgcaacaaccctatttccaaatcagttcacgttctgaggtcctggccattaggacttcaacatatgaatttttggatgacagaatccagcgtgtaacatatcccatatatgacatcttctgattagggcgacccagaatcccactctgttcaaaacagcttgggtttacacatcaatcctgcttaattattcttagcgatttccagtctcaataatgtccaagtttaaacaataaattatggagtcacactacatatgatcctttccactttcatgaaattatcaaaataaagaattttactgatattcccagtagactgtagacataaatctgggaaatagtatttttatgttttcctgtttttattttatggagaagtatatgtatgtagatgtacatatacatgatttttataaaatcttatgaaaaaatacaactatatttttatatgtatgtatgtatgtatgtatgtgtaacaagccatacatatggttttaaaacacaccaaacttattgtgatagaatagtgtggtatataagcagaactttcagtctttaaaaaaatttttttattaataaaatgaaagaaacaagaaacaaaacagagttttatatggtcaacaataaataaacttccatcagtttaagaaaattagaaactcagaccccccagggttcacaaaggttctgaatttagccaaatcaacagcttcaaacccatatttgttatgagattggggacagctcagttctttccatggcaaccaactgtgctgtcataaacactacaggatggtctctaaatgatccaacagttgctagactatgagggagataagatcttattaaaaatacaaaagttggagcttacatacaggaatatggagatgtattgacaaggggatttgcattacatgtaaacagtactttctcatttggcctaataaaggaaaggccccgtttgatgaaaactaatgtgggttaatgcttatcttccttaaatagctgttacacaaattacctaccaacagaaaaggtcataaggagagggaaaagcgaatataggcagccttcactgaaatgtgttttgtgactttgtccaaaattatcaccccactactaaagccattgcttggtaagaactatttttctctcaaaaagacaaaacttatattcttttctaaatataaaatgcattctcattttataaactttagaaatacataaaacattgaaaatcaaaatcaactgtaattccaccaccttaagaatttttagactggaatcatgctgaacatagaattttatatattcttttttcatatagcattacatcatgagctttatcacatgtcatttaaaaatccttcacaagcatgacatttaataaatgcctaatagtctctcatatggacaaaccatagtttatttaaccatttccacattgtggtggatgtttttaatgaacctaatttttcaacattattagtattgtagtaaagagcatcttacaaataaacctttatttatgtttcttattgttttattaaaatacattgctagaaatggaattattagggaaaaggttctgaaacacttttaagattctcccactttaaacagctttttcagaatttttctctattcttacttgcttacaacctcagatgcacttcatttaaaattttattctagaaaacaattctttagaattttcattgggattacattaaaatcataaatttaaatggaaagaattgacatttttatgatttttaggaacttgatatatatatccatttgtccaagtattcttttatatctctcaataaacttttatagttttttcatattgttcctgcatattcattgtattttaaaatttttgttgctatatacaatcatcctgtcattgtattgtttaatcagagattgctggaatataagaaaaatggttactaattttagagatctttatcttctaatcagccaatttgttaaactatcctattacttacaacaagcttatagctggtggggaggtttgagtgcgtgtgtgtaaggagggtatatcatcataccagctaaaaatattgtatttcgcctttttctttccagtgataaaacctcctttcttagggttcttgtctcttctattgcccacagctttcaaaaagttaactaaccggccaggtaaggtggttcacgcctgtaatcccagcactttgagatgcagaggcaggaggatcgcttgagctcaagagtttgagaccagcctgggcaacatagcgagaccttgtctctactaaaaattcaagaaaaattagtcaaatgtggtggtgcgcctgtagtcttagctatttgggggagctaaggcaggaggattgcttgagctcaggaggtggagactgcagtgagcccggaacgtgccattgcactcagcctgaacaagagtgtgatcctgtctccaaaaacatgattctaacaaaaataacaaaaagttaccttgtaaaggtcatagatggcatttttgacttgttctcaagaggaataagaataacctcttacatattacaccaataaacataatgttggttactaagtttaatattggaatagacatatataaatacctatgtctcagggggttgcatagataacaggaataaatgaagcaggccagctataagataatagagcttggtggagactgacaaactggacagtgctccttctaatgtgagctgcacagcagatactcagcttaagcctattatatcatatgaaatgttagcttactgttaacatcctaaccctcatctttttttttttttgcatgtaagagacaatatctgattttatatgaaatctcccaattataaaatgtctataacaaatcattttcccaatactgtacaggccaaaacaaaaaaatttaaaacagtggttcttattcagttcatttgcaaacacaggttttgaataaatattcctaaccgtgaggaagaatcagtttaatccaagtctctgaagagttttgcttttttagaagtacatgttggctgggtgcggtggctcacgcctgtaatcccagcactttgggaggccgaggcaggtggatcacgaggtcaggagatcgagaccatcctggctaacacggtgaaaccccgtctctactaaaaatacaaaaaattagccaggcgtggtggtgggagcctgtagtccctgttactcaggaggctgaggccggagaatggcgtaaacccgggaggcggaacttgcagtgagccgagatcgcgccactgcactccagcctgggcgacagagcaagactctgtctcaaaagaaaaaaaaagaagtacatgttatatgttataacatcttttaaaatttttatttcactcattgaataaatagactttctaatattaaaaatgcatttcaaggatatgatgaacaatactagagtttaattttgttcattaaaattttatttgagctttttatttataatcaaatgtaattcttaaactttcaaatttttaatatttgttcttgagatatgtaagtttcataagatgaattgaggatcagtaatattctgaagtagaatagcatagaaattatctgtttcttgaaagtttgaagaaagtttacctggaaaattatttggcataaggtcttttgaattattttgatttttttccaaggttattggtctatttattattgtgtcaattttggccccttttactttccttgaacaatgtatctttccaacttaacatcaaagaatattccataatattctcataattttatgacctccgtatctgctgttacatattttttcttaattctaatgccttttttatgatggttaaatcaatttgtcaggttcctttgtttgttttttcatagtgctattttcttcacagaaccatcttctacgtttatcctatgaggtttttaaaatttgtttttaaacttagtaattcctgattttggcatcattactacatatttctttcccaaagtgtattttgttattatatatctagcttcttgacttcaatgattagttcatttattttcattaataatgacaacccttaaggctatgagtttttttctccagtagagcattggcttaatcctgaagatatgatatataatattgttactttttttctttctttctttttctttttttttttttttgtttgagatggagtcttgctctgtcacccaggctggagggcagcggcgtgatctcagctcattgcaacctctgactcccgggtttaagcaattctctgtgtcagcctcccaagtagctggggttaaaggcatctgccaccatgcccagctaatttttgtatttttagtagagacggggtttcaccatcttggccaggctggtcttgaactcctgaccttgtgatccaccctcctcagcctcccaaagtgctgggattacaggcatgagccactgcacccggacttgttattctttttcttaataacagactttttcttaagtctgttattgtggacttgacgttttcattgacatatatgtttagaaattttgaaaaatatttacaaggattagaagaattactatttaaactttgttaatttttcaattcattatattacagtcatagaatatgaccagttcaattttacattatagaatttgttgagattctctttgtgattgagtatataataattttactaagtgtttcatggtaacttgaaaaagtactttaactgaacaatataaagttgaatataaatctaatccaacctcatactatgattcaaacttcttgtccttatgtttttctatatgagattataaagacaggaatccaccatgacaatcgtgtttctgtttcccttctgccaagaacttttgtatatgtatagataaaactcacctgaaagataatgattactatatttctttgtggaatttttatttattaataattcttctttcatttaatcctctttggtttttcctaaaattaatattgccatcctgttgtttttctagaaaatattgatgttttaagtaaaaatactaaaaacatctctaaaatattctgatttatgaaaaactcataagcagtatacagctgtaacttttctgattatttgtacttcatttgtttaattttatatatatatatacatatatattttttacatgaacctgattcaactctaggttggatggagactatttttaagcaattcctttaagaagggcagagggctggtacagttcttgaattattaaatatcaatgtttttctacagtcatcatatgagaataagaacatagtaatatgcaatttttaggtcatatcatttccatcttaaacctcagtagacacttttccactgtctttgggctgttggttatacaattaaaatcctagggctagtgctattcttagacctcagtggtagatccttgccccaaactgcgcccctcagagggtccccacactttgcagcgccttccttcaaattttgcaagtcttcatctggtgtcaggggccagcaggggccccctaaatcctggctgcaacccatgtggaccctgatcctttttcttccttttgagactccagattattttgaataactcaagcagtttatgtagaaagaggccccatgaacaatatttgttcagatttccgaagggtagctctgctgaggccaagctgatttttctgtaacttatttcacagatataacaaatagataccattttatatatacgttaaagtgcacagaccttaagcttgaccaatttttttttatactttaagttctgggatacatgtgcagaacgtgcatgtttgttaaaaaggtgtatactaagtgccatagtggtttgctgcacccatcaacctgtcatctacatcaggtatttctcctaatgctatccctcccctagcccctcaccccctgacaggccccagtgtgtgatgttcccctccctctgtgcatgtgttctcatcgttcaactcccacttatgagtgagaacatgcggtgtttggttttctgttcctgtgttagtttgctgagaatgatggtttccagcttcatccatgtccctgcaaaggacatgaactcattcttttttatgcccgcataatattccatggtgtatatgtgccacattttctttatccagtctatcattgatgggcacttgggttggttccaagtctttgctattgttaatagtgctgcaataaacatacatgtggatgtgaagcttgaccaatttttataaaatgtttatacctatgtgaccaccatccagattaggatacagatacataatattaccagcattctggaagtctcctttgtgccctcacccagtcacactcccaacatgcaagcattattctgacttctctcaccatagattacattttttcctgtttttgaactttatatatatgaaatcatacattgtgtactcctttgtggctggccatttcacacagcgttatatctgtgagtttatccatatgatagcatgtagtagtagttcattttcttttcattgtttgtagtctaccatagttataaatcttccacaatgtttccattccaccactgatggacatgtgggttgattctagcttagggttagtgttaataccgtggcactgaacattcttggacgtgtattgctgtagcatgtattccactaggagtagaattgctgggtcattgggtacacattagtagatgctgtcaaacagctttcaaaagaggctgtaccagtgcacattcccactactaatgcatgagggtttctgttgcttgacatgctcagcaagcttttatagtaccagtgatttgttttcagttagcccttcaggtagatatatagtggtttctcactgcggttctaatttgcatttcactgatgaataatatttccctgatgacaatactgaccactttttacatacttgattagtctaaatatcttctcttggaaaatgacaattggaaaatcttactcttttgttattggattgttgggttatctacttttttcaaattaatgtataaaaattctctgtatattctaaaaccaaggttttgttgcagaagtctataaatctacttgcttttctgcacctttaatgatattttctgattaaaacaatctaaattttaataaagtctatttaatcgatctttttctttctggttggtactttttaagaagctttgcctactcccaggtcctaaatatatcttcttgctttaccctttttattttggtctgtaatccccgtggaatcgattttctgtgaatgaagtgaagagggagtccagtttcatttatttatagatgtacacacatttgctctagcagcatttgttcgaaagaccaatcttttccccaatggcattactgcaacacatttttccttttctattctttttaatttttaacttttttcactgatatataataattatacatatttatagggtacattttatattttgatatatgcatacagcgtgtaatgattatatcagggtaattaggatatcctgcaacacaacacatttttttttttttgtaaatttgatgactgcagtaccacgtttagacacaggcaagagaacccccgccccaggccacatgcctcagggaaccaccacaccaccctccatttgaagtgctttccttccattttccttaggctcctgtggctgacagtgttgtctgggtgccctgagccaggatggggacctgcatgtgctttgttcccgttctcccttttgaggtattcttcgaccctctaccactatataagaatccaatcacatgccctgaggagcacctggtccactgctgaccttaaattggtcttaagctgcacctgtgtgggcctgtgtcggctcactcatccatgatcggacggtggtgctgctcctgtgcagcagtggaggcagtggcaggcatgttctactctgctccaggcagtggtaccagggtggtcatctcaccccttcccttccctgccacatgtcaggtagtcgccatggggtggtctcaactacctcctccaagggcttccaggactactgctcctcactggaaatgggcacttccgattgattcatgttcttttttttttttttttgcctctgatcaatgtggtgatgtcatgttctcccaggttggtcttaagccatgccagataatagacagacattctttacatgaatgaggattttatttttgctctacccatggaaccctcctccctgctgacagggtatggaaggcaaggctgtaatcaacactgaaagtgattcctagactaatcattttcaatgttgattactacagcttatggagttcaagagaagacatgattggaagatattttgttccgtatttaagctataaaattctgaatggtaaatttaacatgtttagacaacaaaatttcctccatattctgcataagacctgaatttgtggtaatcttcaatgaaacatagaaataacctttgagagagacgttggaagtccacagtcatgagcagcatgatggatgactcagcatcatgaatgattcagcatcatgaatgatgatgcaaccaacattgaataaacggtagtggagaactgaagaggcaagaagatctattgtgtctcaatgaagtttctgaagaccctggtattatgaatattaagagtcactatcagccagactcagtggctcatgcctgtaatcccagggattacagggaggccgaggcgggcggatcacaaggtcaagagatcgagaccatcctggctaacacggtgaaaccccatctctactaaaaatacaaaaaattagccaggcgtggttgcaggcgcctgtagtcccagctactcaggaggctgaggcaggagaatggtgtgaacccgggaggcggagcttacagtgagccgagatcgctccactgtagtccagcctgggcaacagagagactgtccaaaaaaaaaagagtcactatcttttctttgtggtagaaaatctgaaatcagccaagaatagcacagttgaaaatagtgatcgcaaagagatcacaataatgatcacagatggatggtttctgaccctgaacaggaagagacagtgtctggacctatgaagaatcttcacaggcactgattggataataaacaaacagggaagtagacccactcaacccattattctaactcttcatcaaaaattcttaagtctcatttgggcccatacattttgtaatacattttaatcaaattatttatatagtcaggagccctacagaacatattttcccagggtcctacataccctaccagtggccctagctgactaaatatgtgtggatctgtttctggactctagtctattccactggccaatatgtctctcctctcatcaacattacattggcttaattattatagctttataataagtcttgacatctacttatgtaaaatcttcaacttcatttcttctctaacacagtcttgaatattcttggatgtttgcacttctgtataaattttacaccaattgtcctctctccttccacatacacaaacatgcacacacaaacatgctgggaaattgattgggattttattgaatctaaaaatcaatttggggggaattgctatttttaccatattgaatcttccaacccatcaacatcatatatctttccatttattccagtcttcattaaatgccctcagcaacgttttatagtttttggttttcaggaaaaaaattaaattaattcccaactataataatgtctaacacttgggtgtattttattttaaatttcttttagattttattgttaaatgtataatatatgattgataaatatatacatatatacaagattttgggtttttttagtcttccatatataatgtaaatatatgtacatataagtgttataaatagtatcttcttataaaattaaggttacattttatgtaatgtttcattatgtacttctacttcacattaatcaacattttctcacatagctaaatgtttcttaaaatactttttaaaaaatttctgcatagtatttcatcatattaatgtaccataaattattttagccaatgttctattttgggttacttagattaatccaatttgaaaatgtaaatatttcaacaaaaaacatccatatatataaatctttgtacacatctctaattagttcttttggataaatttctagaagtgaaatgactagatccaacgatataaatttttcaatatttggatatacattgccaagttgcccttcaggtaggtgctgggttacattcccaccagcagactaaaagctgattgttcattctcttcctcattaatattggatattaaattattctgccagtttggtggagaaaatgttttaatttatatttctttgattacaagtaaagttgaaatatgtatttttatatgtttcttgggatttttatattttttcttttataaattacttgcttacgtcttttgccaattttcctatttaggtgtacgtctttctggttagcacttcgtttatgttaacgatatgatatccattagtcatataagttttaaacatttattttcagtttatttgttttttaatttcgccactgtttatttaatgtataaatttaaactgtcataaagtcaaatatttttcagtgttcagttctttttcatttgtgcttaggaaagcctatcttactccaataccaaatttaaaaatcagctgtgtgttttctgcttcttttaagatttcttagctgggcatgatggctcatgcctgtaatcccagcactctgggaggctgagataggtggatcacttgaggtcaggagttcgagaccagcctggccaacatggcaaaactctgtctctactgaaaatacaaaaattagccaggcgtgatagtatgcacccgtagtcccagctacttgggaggctgaggcaggagaatcactcgaacctgggaggcggaagttgcagtgagccgagatcccaccactgcactccagcctgggcgacagaacaagactccatctcaaaaaaaaaaaaaaaaattcttttttttctcatttaatattgtaatccagctggatatgtgtgataggatggaagtagggtataattttgttttgtttttatttttctccagacatgtcaccggttgtcccagatcctgctacaaacacagtaagaaacatacagggcaggattaagatacatgaataaaaagaaatgaaatgaaaaagaaaagtttaagacaattgaaggaaaatgatttatatggaaacaagcgaaggtgagccaataaagactacaaaggagagaactaaaatagtgaaacaaattattttaaattcgaattttcaaaaaatcacttcaagctaaaagaagactttgtagcttgaaaaggcatgccatgttctaggaaaaacagacccagaacagtcaacatcaagtaagtttcctggaggaaatcacctatgagggaaagataggctggcctcacagttctgcacagtaacattcagtgacagcagaagtcaacagctctattttcagattctcaaggaaagaaaggctgaccaagaactttatacccagacaaattatcattcatgtataaagacaatggaaaaacaattttgaacatgcaagagctcaagcatcctttttctttttaacctttcacaaacttatttatttgaaaatacaaatataaaattatactttccacatctgtaatgtgagagaccgccatctacatagtaattttgtacaacagggctttaagaaagccacacacacagacctgaaagattcttgagatagatagatagatagatagatagatagatagatagatagatagatagacagacagatagatacacacatacatacatacatacgtatgtatgtatgtatatagataaatagatgatagatagatagacatgtatgtatacatagtaaaaaaaactcactaccaaagttctcatcagtttcatactaaagtataaaagtaacggtgaggtcagccacagtgctagggaaagttttatttagatacatttatgtccagaggaaacgcttagacttgcatcctattacctatggaatttggagtttacaatacaccatgaacggcagattggctagcccatgctacttaaaaagacattcacagattccacacgggatggtacattacgtacagaatacagcagtagagaaccttcgagggaggctctggaatttttgtttttcagcctccagccccctgccccatcaggcccctgcctcccagaactgaaatcctgtctgagataatacattctgattatttgatagctatgtgtttggtttaaggttgccccccaaccccaagaggggtggattttatttatatgtttttgtgttttagtttacttacttttttggtggaaaaaaaagaaagaaaaagaaaacaaacatactacagtattaaaatattgcttaacttccagcatctccttgtgtagtgtctgtgcccaggacggggctgagctgacatctgccaggtttctgctttggggtgagggtggggaaacccgccagcatctctcttcagtgtgctctcagtccctctgctctacccactgcctgccttccttggaagatagcttagctgctgaagtacatttaagaaaaaaatatatatatcccctcccccaccaaccccccactcgccctctgtccctgcgtgccacttgcgatcgataaagagaagtatgagtcggtgtttcttttgtaaacaatttcatatgcaatataatacagaaagcatgactgaccttcaattaaaaatgcagtaagctatattgctttattcttgcatatgctgcagtgagcaaatgacagaatgaagcaatgtggaagtggtggcggctaagtccctagccctcatttgcactaaagatcaaaataggttttgtttttctatttggaaccaaaaataaattttttcccccaaaatcctcaaagaaaaaagagcaacaagcaaaacctgcccccaagaaatcaaaaacaaaacaaaaccaaaaccaaaaactgaacacctttcaggtcattagaatcaacaattacacaatgatttttagactagtctagcaagatgtgtgtaacattcactggctgtgattgaccaagcatcctttttaaactcctgaactttgaccaaccaagagatacacacacacacacacacacacacacacacacacactcacgcagagccaaaagattcgcagtgaaacttaaccctatttgtttgtacaatcaagatcaaaacaaatctaggaagtatggcaacagagaagagtgtaaatgttaaaaatcctaacaactatacaaaatagaaattatgtaaatttaaaataatttgcagaggaaagagaagagaatgtaaaaatataagtctgctcactctctcatcatttgcagttgggaggttaaaataactaaattaaagctaatgaaataaaaaggcataaaatatttaaaggtaagtactaaggaagataaaacagtaaactaggagttggcaggggaagatcatttttcatagtagagaattacaagtaaagttgaaatatgtattttcagatactctgaagaaacagaagtctaagggtattatgcaacattttgattgcagatatacgcactagaacaaaatacaaacattccaatttatcagaaaaaaatctacaagagtcaagaaaatcatagatgatagactaagaaaaaggctaaaaattagaaagcattacataaaataatatgccattatatctgtcatactagtaaatataaatgggtaaaactaatatatgattttttatgatgcacaaagcaaaaatcaaaacagataccaaaaaggcaaatgcatcaaacatagacaaaagatattctaagtaatgttaacaaagagaaagtgggatgtggcagagacagtttgtcctttccaaatatttattgacttccctgtcttttccagccttccctgtggaataagcagacttatgactaattctagccaatagactatgcagagaattgactagcatttcctcactgagacaggtaagaaccagtgtgcctctccacttgactctttccctgtcatgttctcccagtggcatagccaccaggtggaacaaggcaaccgagatcacactgggtttggcatgagcaggaaataaatattttgtccattcactgaaaatcggactttaatttttatttcaatagtaatagctgggctgtttgtaatcttaatatcaatgttgagttcaggtgaagaaaaataataacagcagagcacttttttaaatgataaaagaggggactgttcacaatgaatatatcacacttatgaatgcctatgcaccaaataacttagaatcaacattcataaagtaaaagtgtcagaaaacaggagaaagaggaccactttctttgaaatgatatattggccacaatttctctgtgcactggaagatggtgatcctctttccctgcccagtgcagccacagctcttggtgccaagaagcatctgaagtgggtaggagccccaaagcattggatgccgaatacattgaccggtgtgtttgcttgccacccatacaccagtctccacaggctgagagtctccccgtcatcattttcctaaggaacagacttaggtatgcactgacaggagatgaagcaaagaagatccgcatgcagcagttcattaagatcgatgacaaggtcttgactgatataacctatgccactggttccttagatgtcagcattaacaagaccagagagaatttccatctgatctgtgacaccaggggtcacctattacacccgaggaggccaagttattcaaagtgagaagaaactttgtaagcacaaaagaaatccctgatctggcagctcatgatgctggcaccatctgctgccctggccctcatcaaggtgaatgacatcgttcagactgacttggagactggcaagattactgatttcatcaggttcaacactggtaacctgtgtatggtgactggaggggctaacctgggaaggattggtgcaatcaccaacagagaaaaacatcctggatttttcgatgtggttcatgtaaaagatgccaacagcaacagctttgctacctgactctccaacatttttgttattggcacaagcaacaaatcatggatttgtcttgcctgaggacaaggtatctgcctcaccattgctgaagagaaagagagaagagactcgtggcggaagagagcagtgggtgaaatggtctctaggtaaacatgttagaaaggtctttatacttaattaaaaatcatacatcatgaaaaaaattaatgaatgacattttgatttttttctctcagtccatgagaaagcaggtgaatagaacatttgtaaaaaagtagaaaacctaaattacaaaattaataaattaaattgtaacacattaaactccataccttgaaaacaggaaaatacatttttttctcaagccttcatggaaccctcacaaaaactaaccatatattaaatcacaaaggaaattatggtaaattttaaaaaataggaattataccgataataattgttattgcaaagcaataaaactagaaaataatatgaaaacaaaaattatattacctagaaatcctttaactatctcataaacaacttttgggtgaaaaagaaaatcaaatctgaatttaccagaagtatggaaaatgacaataacaaaaacactacatgtctgaatcactgggttacatctaagatagtgctgataggaaaaaacctgaaatacttatattaacaaacattaagcattccattcaagaagttagaaagcaacaataaccaagaaaaagaaatggaaaagcatgttttcatttataagtgggagctgaacaatatgaacacataaacacagggaggggaacaatacacactggggtctgtgtgggcagggggttaggggagagagagcatcaagaagaacagctaatgcatgctgggcttaatacctaagtgatgggttgataggtgcagcaaaccaccatggcacatgtttatctatgtaacaaacttgcacatcctgcacatataccctagaatttaaaaaagaaaaaaaagaattctaagttaaagaattagaaaacatagaaaaaaataaagcttatcattaaatgtaactgctaattctttgcaacataaatacaatgaataacctgttagctaatctattcaagatacgtggaagaaaggacaaataacaatttaaatatcataaaagtgaaacaaaccacaaaaaccaagtaaactaaaagaatccaaagaaaccacattgcccatgactaaaaaacacatttgaaaaacaaaaggaaatgaaatgttttcataaagaaatgtagtttacaaaaactgacaccagaagagatgaaagatctaagcagaccaattaccataaaggaaatatagcaagttgcaaaagaactttaccttcatccaattccctaatcccccaatatctcacccaagaaagcaccaggtctagacagtttcagaggaaaatttttccaaggctttcagaaatagattacttcaatgctatttaaatggtttcagaacttagaaggagcacttccaaattattttcataaatctagcataaaatcagtatcaaaaactaacaaaaataacacacaaccaaaaactacagataaatctcagatatgagtataaatggaaatattctaaataaaacatcagtgaataaaatctagccacttaacagagaaacacaacataaactaagtagatgtattccaggaatgtaaagatgtttcaacatcagcaagtttatcagtttaattagcagcattcatagatcaaaagaggaaaattgtataaccatcttcataggtactgacaaggtatttaagattactgtaaaaacagctggaactcttatacacctggtggtagtaaaaatctgcacagccactttgggaaacggacagtatctacaaaactgaacatatacataccctattatctcttagggttaagccacaataaatacatacatatgttcagtaaaagacttgtaccagaatgatcataacaactgaaagctgaaaacaaccaaacatccatcaacagtggaagggagaaaaaagttatggtatatttctacaataccctacaaacactattaaagtgagcaaactttggctacatacagcatggatccatctcattgacatgatgttgagcaaaagaatatatactgcataattccatctatacagaatgcaaaacaagacaaaactaatatatagttttaggagtcaggataatgcttacttttggggaggctattacctgggaggggctgtgtggggctgtgtaggagcttctgggatactgatgatgctctcttttctcacctggttgttgggttacacaggttctccaccttatgaatcacaataccaatgacttgtgcacttttctacatgcatttctacactttaagataaagtatactttaaaaaaaaaaacaaagatacttttgaacccctcgtgctccagataagaccaccctttccttcttctccttgttcctgctcaccatagacaggaatcaaaagaaggcccaaggctttgcctgtttgtggccatgcttcccactccatccccaccctccctacaactctcagagcctcaccgccagtataggccgaaagaccatcagaaacaatttcattacacctttatgtgttcacatccatcgccacaagaagcccaggacccacaagctatctctcatcccctgtactctaactttctttctgaccctgtgtctcatccctctccaactgctgaaacctttacactgttccctctatggctcttggacagtctccagcaaaatcctcaaaccctcagcttcttctctgaaagtccccttcagtttttgctctaaaaggacctgaggaccctgcagccctctcctggtgggacactttctccccacatccttctaccatgaggcatatggtgagctaggggttctcctagctctgtgttgtcatttctttttttttctttttttttttttctttgagatggagttttgctctgtcgcccaggctggagtgcagtggcgcgatctcggctcactgcaacctccgcctcccgggttcaagcaattctcctgcctcagcctcctgagtagctgggattactggtgcccgccaccatgaccagctaatttttgtatttttagtagagacggggtttcaccatgttggtcaggctggtctcgaacccctgacctcgtgatccacccgcctcagcctcccaaagtgctgggattacaggcgtgagccaccgcgcctggcctgtgttgtcatttcttcttctgtcttctgtcttccctgaaactcccagcctagaatgtcttgttttcaggctttaacacccttctcattgttgcatttgcctaccactcctggtcacaaatatcctgatgtttttccttttcccttgctgtcacttctttaatatgcccatcataattattgatgtttcaagagccacaaagatgatcctttcaacatcttggccattctgttcctccacctcccctcatccagtgatcttctccctctgtcctcagacactcaccctcatggtaacaccctagactttctaaacaccttaacagcacctcctccagcaccacagttttaaggatggccactctctgaccactacctctagtctttttggcttcactctctctattatttttactttaccacttttttatctccttcactgagacctacaaaacagggagaaagatgcatgtattgaacaaaataccggtgggtttgaataatgaacagaatacctgtagctccatgtctataaccaggacagacttaaatatatacaggcattaataaatctaggaaggaaggacaatttcaaatggtggcttttttcctagattcaagaatatgttgttttttaactgactgtatatttagtgagaaatttagtagtatgatatcatagtggttcaaattttgaatctctttttgagagaaaagggggcaggaaagaaccagaaaacatggcattaagtaactcaaagaggagaagtggtttctcttattctttccaaggatcctgtggtaaaagtaagaaggaaatgaagtatatgccaagaggagagcccaaggtagtaagggtagatgggtagttataactacctgttgtttctttcccttttggatggcaggggcatgatttacatgttcatgaatttctaatctagaaggcattcatgcaaaacaaagaccataagcttatgttacaacatagtctctgcaaggaagggacatgtctggtcaagctgtcagaaatcaccagaagtctctcagcgtgtgcccctttgctgttctggaagctgtgtcagttctttgaagcaaaccatatttttttgggcaacacaccaaatggtgatgtaaacctcaaagcctgataagttgcatctcagttctagctttttctcagaaaactttgctttgtctgctacaacttttagaagatacagagggagagaattcattgactcattgactggggcaatagtcaacaacattaggatgttagagaaagtccaagttgaggagaactggatgtctgaaactctttgattataatacttttccttaatattttttatgactctgcatcctcaatatctaggattagatcctgcagcactgaagtgcaaacagtccttgacaaaacagattttatggaaaaatctgttgatgttttcaactatgtctgtacatttagatgtaggtgttttttaagagcctactctgcttttggcactgttaaggaggttataaaaaggaataacgcaagaccccaatcacaaagaacatataatctagcaaaagatatatgatcaagcagcatgacaagatggtataaaataagaaagcatgaatggtctaaacagaagtagattaccacagtatgtacacttgtgcatcatttgaagcaaaaagtaaagagaacagtcaccattatctgattccattcaacagtctatctcgtaccagtggaagctggggagacaggattagttcttgttgcttgcctttgatgttgggaccaagatatattatagcagatatatttctatagctcttccagaaaaattcttttaataatggaagatagatatctcggaatactgtaaattaagcaaataagcccttcattgtgaagaatacgaacattaaaactaacaaatcagtaattgtttctttttatattattaaatttgcataaagcgcaaaaataaaacaaactaaaactttgaagattaaagacagaatgatggccagagcacctccttcctccgtcctaaaagtgtaataattcagatcacatttagcactttcacttagtggataaactagaaggcaaagcaaacactcctggactgtgcctgtgaagaagtgagcaaaaatgtgaagtcttgcttgcattatcttgtaaatttggcaatgaattttccatgaggaaaaaactgtaatttcaattcctaaaagacgcgaattaagttggacagttttggaacctggatttatatatcgatttggtttatacagtcttagcaactatcccctatgctggggtatcaaagctgtagaaattatcagtttctcagttgcaattcaacgtcagtgttggggggttaggcaagtgggtaaatataacaagttgtctcctcagaaaatatttattctgaagtactatttgaaatgttgccagaaaagaatgttttaaattttagagttttacatttttgagttttaagttttggagtccatgttcttttggttagttatttttaaagtaatccgatgcaataaaataaatagatgaaataatcttatagaaaatattcaattatactattaataaagaagggtaattataaatgaaataatatttgttgctgaacaaattagcaaagattgtttttgatgaggatagcccatgccgtgaaagtgtatggtttaattggtacttccatacattcctggagtaagggttcattggatcattgttttctaatgaaatgtaataatatatatcacgagcctttaaagtttctaagacatttcactcactattgctaatcctgggaatccatcttatctaaaacataaaaagcttctagaaattttatgaccaaagatccattaacaataaaaatccttccctttaatccaaatgaaccaatttacgtcatgtacttatcactgggccagaggaaatgcccagtgcataggtagacaaggtaagcctgaaattctaagtcagccattggaaagaaaatgggaacaccaaaactggcttagactaatccctaatgacctccagagctagagtcaatttctgaaactacatccctgctacacaaggggagaggaactggatgcataagaggaactgatctctatagccaccccacctggttctctaattttcctcacctcaatgtggggaataacctgcatctgtcaggttacatgatatgatttggatgtttggctccaccaaatatcatgtgcaaatttaatctccagtgttgagaggtagggcctagtgggaggtgtttggttcatgggggtagattgctcagaaatagactactgccctcccttcaaggtgagtgagttctgactctattagttctggagagagctggttgttaaaaagagtctggcacctcccccctctctcttgcttctctctcaccacgtgatccccttcaccttccgccatgaatggacagactgaggccctcaccagatgcagatgtcaataccatacttttttgcatagcctgcaaaactgtgagctaaataaacctatgttctttataaattgtctagccttaggcatcccttatagcaacacaaaacagactaagacattacttaagacaaaaaggtggaatcatccctcagtccccttttccatagtcctcatatccagtgcaaaactaagccctattattaggcagaatcatgtgaaattgtcaatatgtgacctctttaacctacaaaaatgacagtatcataaaattcaacctgcaaaatatttctcaaacccattcatttctcttccaccagcaccctagttgaagccactccattcttcccctagacaactgcagtggcctcctgatcaccagcctcctttccactcttacctccattctagccagagcaatgtttcctgaacataaatcgagtatgacgctgcattttaaagcccatcgtggttccctattgctcttagaatacattgcaaacttctttgcctggccacgaaatccccacctcatcagattcttaccttcaactccagtctcctcccactttgtgctccaggcctcagggacctcctgttgctcttcctcttccctcatgccctgctgactgcccagaacactcctctcctcacctgtcaactggccaatgcttcacatcctgcatctttacacttcagttaccttccctgaaccagcctctccagactccccagtctatttcattttccctagtgaatccctcatagtaccctacttgtttcctttttggaagcaatttgtaaatacatatttattttgttgttgttgttgtttattttttaatctctctcttcctactagtctggatacttaagggcagaaattgtgtcttttcttgttttcatcaatactgggtacacagcaaaccttcaataaatctttgtggactagattattgtataaatgaacaaataaatgaattaatgtgccaggttaaaatgttgatggaaaaaaataggctataaaactgtgtggacattatgattacaactattttgtaagaccaagcactaaagaaagagaggcttagaaggaaataaaacaaaatgtttcatttgggtgatgggattatgagtaatctgatttttttctctttgcttttctgtattttcaaattttctttaataagtataacttcaaatatatattttaaatttttgagaaaaatatttacttcccctataatctcctcctttcaaaattaaaattaaaatttgatctcacaatatttattataaaatgttttcctctatattttccagcatatgtagtcaatttctctttctggcatacaggagttgaggagtgcataaggagattctaaatggaattcttggatggaagaagacagtcactaattcctggttccagaatgtggagaaaattaactagattacataaatatctacatgccattgtttattgtagatgtggataattatgcattttccatgtaaggtggtattacctgacattttcaagcaatttcatcgccagatgggcttctaaaactttaccactgtgtcctcaatgtaatcatcagtaaagataactccctattttctgaataaattacctgtttatcctcatcgaatattcctcattgaaaccttttttccactctgactttccttcattttaaaaaaatatcagacatgggccaggcgtggtgactcatgcctgtaatcccagcactttgagaggccaacgcaggcggattgcttgagcccaggagttccagaccagcctgggcaacatggcaagaccccgtctctacaaaaaaaattaaaaattagcctggtatgggctgggtgcagtggttcatgctcaggcaggagaatcgcttgaggccgggaggcggatgttgaagcaactggagatcatgccactgcactccagcctgggtgacaaagcaagactcagtctcaaaaaaaaaaaaaaaaaaaaaaaaaaaaagagcctggtatgatgcccctatagtcccagctacttgagaggctgaggtgggagaatcacctgagctggggaagtcaaggctgcaagtcaaagccctgattgcaccactgcactacagcctggatgacagagtgactgacacacagtctcaaaaaaaaattaataataataaaataaaataaatcaaatgtgtttatacagatgaaaaggaaataaagtgcaaaattctttctgtttcaaatccacccacttcttgctgcttcttgccacatcccctctgccaccactccaatccaggctactgtcatttccaacatggtccttccattcatttaaaagaacattaggagatagtttatataaaataaaatgcacccccctagttgcacatttcagtgagttttgacacatttatacctcagtgcaagcaccatcaaagagatgtaggacatttccaaaatctcccccatgccctatcccagtaaatccattgtatggaaagaccacaacttgttttatctattcccttcctgatggacactagagttgtttcaagtttttggctactgtgaataaatattctacctgcattcatgtatgagtctatgcaaacatgtgttttcattttccttgggtaaatacctaggagtgggattgctgaattatatgctacatgtatatttaacttcataagaaactgacaaactgtctcaacaatgtttttcaaaaaatcagaagttcttaattttaaataagtttatcacatttttcttttatgattaatgccttttatgtcctttttttgcctaccctaggttgtgaaatttttattttctatattttttctagaagttctacaggtttgacttttccatagaaatttttagaatcaggttggcaatttttaccaaaaaaaaaaaatcctggtagaatttaaattagaaatatgctaaatagatcacattcagaaaatgaacattgtaaaaatattgttttcccattcatgaacatggtaaatctcttaacttatttatatcttctttaatttctcccagaaatgttgtatggttttcagtgtaaagggtctgtacttactttgttaaatttatccctaagtatttcatattttgggtgctattgtaaatagtattttaaattttcaatttacaattgttcattctatacaatgcaaatataaaagaattgtccatatataaaaattaatttctgtataccgaccttgtattctgcaaccttgttaaactcatgtattaattccaatagctttttgtagatttcttaatattttcttcagacataatcactttattgcaaataaaaacatactattttctttctttccaatctgtattccttttatttctttttctggacttttttcagtgactaaaattttgagtataatgttgagtataaatggtgcgagtgggcatccttgccttgttcacagtcttagttagaaatcattcagttttttcagaatgaatcatgatgttaactgtaggttttttgtagataatgtatcaggtttttattctggtttgctgagaagttttaaatcaaatgggcataatataattttatgtaaagaattctatttgctaaagtattgtaaagatttttacattcatgtctatgtgttatattggtctttagatttctcttttttgtaataaccattgtctgattttggtagaagagcaaacctgatcccaaagattgtttgtaaaatgttttcttctcctctcttttttgaatgagtttgtggaaaattggtattatgtctttcttaaatttgaatagactaccaccagtaaagccacctgggttgaggttgtatgttcatatgtctgtgtgtgtgtgtgtgtgtgtgtgtgtgtgtgtgtgtgtgcatgtgtttgaaagttttcacttattaactcaattttcttaatacatacagggctcttcagattttctatctcttcttgagtcaattttgataaacaatgtctttcaaagaattttttcacctcatctaggttttaaaatttattaacataatgttactcaaaatattttattattttaaaaaatatctataagatctgtagtgaagtacctccttcatcattgtcaatctagctagcatgttaataatgttattgatttttccaaatatcagattttggttttattctttttctcaattgtttttctactttcaattttattgcttcctatttttttctacttacttcaggtttcaattgcttcttgtttttctagtttcttaagataaaagcatatgctttgatatgatcttctttttaataacttccatttatttcctcattatgtcttatgttttcctttacactctggaaaatatataataattattttaatatcattatgtgttaattccattatttgctgctgtatctttttctgtttcttgtttctatttactcactttttctttgttatgggtcacattgtcctgcgtcttttaggtctagtaattgtttattgattgctggtcattttgatttgtatgttgtttactagattatgtatagtttttaggagtgttggactttttatggcagaaagttatttatagattggtttactcttttggggcatatttttaagttcttttagggtaggtgtaaagtagcctgtagtctagagataatttagccccatttctgagacacactcttctggggtctctgttaattgccaggagtatttagtgaggtctcttctctggctgagggaattaggacaattcccagctctgtttgagctatgggaattacttgtatcacaactctccactaatagtgctttccttaagaattatttttggttggcttcatgaattttcaccctgtgcatgtgtgtattggtattcagccaaagactcaagggaacgtttatgcagatttctggaactttttctgcaaataactcctcctgggtaccctgccccaaaattctaaatgcctcaatgtcccagaactttgatgtccttctcctcaactaagaaagattgttgcattgtatttgagttcctgtttcctacacctaaaactggaaattacctctggacataaagctttaatgatggtagggcttacatcatctgtttcccttttttcagagattacgctcttttactacatgttgtgtaatagctgaaaatagttgtttcttataattttccagttttttcattatttgcagtggaaggataattccagatcctatttatttcctatggctagaagcgtaagtctcttccctttctgttcatttttgacatctgccatccattctccccgctgtagccagagtgattctttcaacacaaatctgatcatctcagtaccatgctgcaatgagggctgcagaccccacctggtcttatcccacctactcccccagcatcagtttgcaccatttcccaatttctacttcatgcggcagcacactaaactactttcaacgttcttcaaatatgccgtgctctctctcatatctgaacaattgcacatattcttctctctacttagaagagatgccctgcgccccacgtagccactatttctgcctaaaatctacttgttcttcataactaatttatgtttcttcctcagagaggtctcccacaaaaccaagagttggttttacacctgcccaacactctcataatgccttgtatttgccctgtgtgataaccctcatcattttattatacttattgtttaatatctgtattctgtattggactgttaaatacaagtgaaagttcagcatctctctcactaaatctgccaaatccccaagtgcctcacatagcagcttgcagaatagctctcaataaatatttgtgaataaattaataaaacataaggtaattaactaaagaactgatagtgggggtagggggagtagggagagaaaaggcaaaaaaccaaaaccgccaacaaaacctaatatgttaaaaaaaaagcaaaaacaaaacagaagggatcttaaggacagcaagtttccattttgctgactctatgagtcaaatttcccagatgtcacttagctcctcaccagtttgcctgtcgacagaggcactaaggtaagaatggtgcatttgatacctttctctctgcaaaccaggaagactcggagtaaatgcttttctataatggagtttttagaagtaatcatgatgaacaaagtctcacaataattgaatgtagtccccaatggttctattactctgtcttggataattccacagaagaagcaggtccattatgccttaacctgttctttgtcaccactgttgatttagtgtcatggtaaacaaatgtccacagtcctattatgacattcatcatcctaatcaagtcatcagaacaaacaaagttagattgtagcaatcaaagatctgggaaacaatatcgaaagattgtatgttttatacaagcgaaacatgcagaggttgtaacattttaattcaaaagttgtggctctattgtctaaaatgtagaagtggccggaatgtttgtagtcattcagtctttatcatttatcactttttcaaaaaataaaatgaaatcaaactttttcccttaaaggggtatgctttagtgtcatgtttagaagacccaacaaaaggaggcatttccaaactaaagctgattcccttatgaaactttttggtggcaaggaagtcatttattcactattcagtgacatcataaaatattagatagaactaaaagtgtctgtacagtatttggtccaatctcctgttttagaatcacaaagtggtttttcaacaggatccactgtttccttgagtatcatttctccctctgatgtttgacctcatttgacctctggtccattaatgcttctcttcttttctctttccatcagcccctttgcgtctcacttcccccatttccagccttgcctccacagcaggtggtgggggcactgctctagctaaccatcaagagcttaccctgctgacctgccctgtctgacattccatgaggcactgaaccagcctcatgtcctcaaagtcctcttggacatttctctggcaagcgtctcctcttcagctaacatctgcactctaattccatcaatggattcacaagagcaaatcactaacctggagaattgatccacttcagagccaagctctctaacctccccaggctgctggttggttctttaattcatctcatactgatgttcaccctcacagaattgaactccaccctcacagaatctttaaatcattaaatcttgtaaatacctggaatcctggagaccaacaaatccaaatcttttttcttataaataaagaaatggaagaaagcccaagatattaggtcacacagttaatgataaaggtctgactataacccagaaaagggaaactacaactccttattccaccctagttcacctgtgccctcacccttcaagttgtgggttatcatttcaacacctatttaacgaacaacaaataaatcagccggtagaaactcccttgattttctgtctctaccccaacatgacggaatgaaaaatatatataggctttggttccagaaagaccaagtctcagctccactatttaccaaaaatgtggccttgaggaagtgactaaacccattttggcctaaatgtctttccctgtaaaacagcaacagtagactggtaatacattccagaaagggccatcagcgctcgccaagtccccacattcgaccatcttttttcagtcctcatccatcgtcatctctctgcagctgttacccattcttcctgctttaaaacactagttctctgccttgaccacaaattgtcatcacttagagaactttaaaatctgctgattcttgggccccttcctcagagattctgatataattggtatggagtgtagcctgggaataggaatgtctggatccctcagatgattctagtgggagaaaagtttgagaagcgctgtgttttgtttttttttttttttttttgagagttatgctaatcttgtttgtttgtttgtttgtttgtaggtgcaggggtacatgtgcagttttgttacataggtaaattgtgtgtcactggggtttggcatacagttttgccacccaggtgataagcatagtacccaataggtagtttttctatccccttctttctcccgccctccaccctcaagtcagccccagtgtctattgttctcgtctttgtgtctgtgtgtactcatgttcccactcatcaatgagaacatgcagtgtttggttttctgttcctacattagttcacttaagataatgatggcctccagctccatccatgttgctgcaaaggacatgatctcattctttttctttggctgcatagtattccagggtgtatatgtgccacatttcatttacccagtctaccattgataggcatttagaatgatttcatgtctttacaattatgaatagtgctgcaatgaacatattcatgcctgtatctttatggtagaacaatttatattcctttgggtatatactcaataatggaattgctgggtcaagcggtacttctattttaagttctttgaggaatcaccacacggctttccacaacagctgaactaatttacattcccatcaacagtgtataagcattcccttttctctgcaacctcaccagcatctgttatcttttgactttttagcaatagccattctgactgctgtgagatggtatctcattgtggttttggtttgcatttctctagtgattagtgatgttgagtttttttttttacatacttgttggccacgtgtatgtcttcttttgaaaagtgtttgttcatgtcctttgcccactctttaatgggattgtttatttttgcttgttaatttgtttcagttccttatagactctggatattaagcctttgcaaatattttctcccattctataggttgtttactctatcaatagtttcttttgtgatgcagtagctctttagtataattaggtccaatttgtccatttttgctttcattgcaattgcttttggcatctttgtcatgaaatctttgccagggcctatgtccagaatggtatttcctatcctaggttatctcccagggcttttatagttttaggttttatatttaagtctttaatccatcttgagtggaattttgtatatagtgtaaggaagggggtcagcttcaatcttctgcataaggctagccagctctcccagcactatttattgaacagggagtcctctccccattgattgttttttgtcacctttatcaaagatcagatggttgtaggtgtgtggagaagtgctgctttaaaatcattgcttgttgtattcctgagacagactgctgttctgtgttttctcctacctctcggtcacttctttgtatctgtcactgctatttttctaatactctgatggttttatccatagcatctacaaacatagctcatttgcatctgaacacttgacatctaactcaagttccccatatctgcctctcttgacttacatatttgggttaaaagtccattcattttcatagttgccctggctcaaaactagacatgtggaaaagtctagacacttaaagcttgattcctctttctgctgttgctgctctgtccagccagggccaggctgttcttttctctctccttcatcgtctttcatggctactgcaatatcctccaaaatgtctctgcctaccacccttctcccctggttccgtttccacccctcgattattgaatgggtttcttctccatagcatctatcaacatcctaatggagtggtgttctcaggggcccaccatgggaatgttgcaataaattttgttacaaaataatatccctcccccgacatgccaagtcaccttctccggtgcatttcttttcttcctagcactggtcaccttctaatttcacattatatgtttgttagttatgtttattgttagatatctgtctcccatcattacagcataagctacattagggaagacatttttctttttgtgttttttgatttgttccaagatcctagaagagtgcctggcactcaatcatcctttgtcaaataaattaataaatttcagccatagtcagcaattagtgaattattcacaaagaggtgagtcctgctaccagagttcagagtgccctggtaggattgcctcaagcccttctccctgagacatccttgggcttcaggaggtgaaaaggtgtagagtaggtaaggagaagaagaggtcagcatggtagacccatcagataagaccatgtattgatttttgcagaacttcttttggttgtttcctattccactgtatttataaaatgtggaaatcccttgtcacatcactgttcagtcctgacacagcccacagaaaattacaagggacataggctatctactggctgagcagagctcaacaggcaccagtgatttcttcagggcttcccagcaccaaagatacagcaagtaatctttctctgagattaacctggcctccagccaccataaacactcaatctcccttacagggaggaaagattaaatatctgattaaaatttttggctgctaatttattgaacttggatggaggaactgtttgcaagtcacatgactttccctgtgtgtctgccgtcgttgtcccacgcaacagagcgaggtcaccgtgcagctgaaaaacaaggagcagccgagtccacgggggcgggtggccgaggggtacagttttgggccatcttggacaactggggggtcagttcttccccagttggttcaggaaagttcacatagtctgtggctgtttctgtttcagcctctcactctctgttcttgatgctttgtagatttggttcatttcatcccacccctgcctattgttctgagccacccagtgcaatgatgtcatgggcagcttaaaagtatacaggaagtcttcaaagctgaatgacttcaatatactttattccatgcgctcttgctgctggctgtctatggaaactgtgcccggcagaactcagggaggcagccatagggttggagactctcctctcctcctcccccattccatgctccccaccccacccccgtgcctactgctcccatccctcacctccatcccagggtttggacagaggccagaccaaaggagggagggaagctaagagaaaggaaagccaggggaatcgaaggtcaaagggagtttcatcagaaaaataggggtgcaggactcccaggacaaccaaaggtcacttttactggcctttgagtgataaagtcagtctgtctggcagagctgccagtcatggtactgcccctggagaggaaaaagtgacaaaaaccacaagtgacttgcctcaacttgcaaactgcagcaagagtgtggcatgtgatggctgcccagggatacatttggagtaaagttaaacatgaggtggcttgtaacaggataataatagcagatgtgaggatggggctttactgttcacacagcacctttgtatatacatactgtcctctgtgtccctcacaaatcccaatgatggaggtagggaaaagcatgaagaagggaacgtttttacttacccaaaatcactcagctgtccagggtagacttggggctcaagtccagatcccatgttttcccagcactccactctgtgctcacatcacagtcctggcttcctctccttatccctactcttgttagaaattacctctgagttcatccttgtccaactatcattttttcatattgccgcaccttgtggaactagaagaattcttctttgctcccacaaaaataacacagagtttgtgcctggccgtggtgcctgtacctgctcaaccctccacagccttgcagggaatgaatttcataggtatacaggctagccttcgtcacattgttgcaatggcattgtgcattgcctagtcattattacacaccctgaggcaactatagttacatggtactggtattgagctaagaaaacatactcggaaccaggtgtgtgttttcctgaagtcattctgcacaagcacagaagacaggagttctcaatctggggtctatagatagaatttaggggggtgccttgaaacagtgtgggaaaaaatacatctttcttttcattacactttaatttaaatttagcattttcttatgaatgtagacagcacaccacatcagtatgtcagtatatctgtgacttcgttaccactagaaactatagatttttcaaatcacatttcagttgtagcaggtatcttgaaataacagttatgctcatcactacttggaattatagtgtcagaattggagaattatggtattagacctgctgcttaatcttgttatgcattgcattgtacagacgcacagatattttcatatcacaaacctagtttctgaacatttcgataacgcatgcccccagctgcacggaaggaaccctaacctttttcaagatcctttattccaccctgtcctaattatttcttgacgtttctggggatgtttcagaccatatttccacataactggcttcctttctaatcctaaatatattatcttatgcatttaaagtattagtctgagaaggagaatgcaggcttcatcatactgcccaaaggatccatggatcatgaaccaaaaagttaagagccccagattttgctgtagttcagagtgctggggtggggtacaaagggcttggtaacccgatctgagccttcccacagcctgctagtactccactctgggcagggagagagacacaggcccaggccatgtccggtgaggagctggggtgaccctggcagctgtgctcaccgtcatctcctggtgctgctgccccagccagttcacatcctcacactcatcccagggactgcaccttctgatgactgcactggagtgttccttctcactaagcctcacagccagggcttcagagctgcttcccggcaggcccagccataccactagcactctgaagcattgcctctggctctcttcagagaaagcgtggtcaggacaagctgttccatgtacagttatcaagcctggtttcccagcacatttcagtggcaactctgcacagcatagcaaccaactccatcgcctctctgtggccctcagtgtgggggagtagccaagccagggacagggaggaatctaagttattggaggtaggatatgtgcacagccattagggctttttgcccagcctatcgggctgaggtgatctaatcctacaaaaattgaatactatttcctacatactagccttgttattctgggtcgcgtaactccattgctcatggaacttaactctaggcctcccctgtctatgcagacatagtaacactgattgtcaatttctatggcgtaaggctccctacctgcataaaaggaacttgctccctgcaggagctttttatgtactcagccctaattatttcttgcagtccccggtgatgtctcagacattcttgtgaatctgtctagaccaagtcgtggccaccaccacccagccttgacacaaggatccaggccctttcttgctgcctttgttcgccaccactgtggccacagccatggcacattcctgctgatctctgcctcccctgatatgttagcgaagtcttgggtgccggtttcaatcctcctggcacttgggtactccaggcagttggttacaaagtgagaagagtagctccctgctctctgaggtcccggctgctagtaggcaccacagcagggcagcatgggctggaagatgctgaagcctggcttactgagtggcacctcctaatgcacagacagccgttcccactccaggctgcacagagccctgcaaagtggtggggtcagggcagattcaagaaaatctaaggtctacaccttctctcagccccacaaccttgttggtaagttggactcactgcctgaatcccccttccttaggtcgatccctctctcaggcatccggagaatctccccagcaatttgacctctgtcaccctgccctgctctccccattttgttctccagatgagctggtgtacatcaggaccccctttgaagacccagttcaccgtctcttaccgggaaacttcttagcccccagaaaaatccaaacacaaacagctggctggaggctggatgagaaaggagtatcctgactccacccccaagacccgtcctgcctcagcctggccccagcagagatgctgtctacagttggtagaatccatctccttcttcaaatgcttttaaggaagccacattgtggaaggcagtgagaagatctcttgctctcgcttcctgtacctacagtagagccttggcattatgtgaggtggaaggaacttggaccctggagtttgagtaaacaatactccagcaacaactttgccacctgctcacagtgagacctgggcaagagctctctgaagctactttctcacagggagatgggaaagactcgtcctcgcccttggggttgttttgagggttaaatggaaaacctaagataaagaacctaatacaatgccttgcacatagttggcatctgataattcttagttcttatttttaatatattttttgacttgtgccagagtgtaccatgtggatgttagaggcattgaaaggaggtttctggaattgcataacaagcttatcaattacaaaaatatttccttgctattcattaagtcctaaaaaagaaatataagcaatatgaaattgtttacattatgaaataacaacagatataactgaataatttgtaaagcaaaattaaaatcatcctattcaatgtgcagaaaagtgggggaaaggtggggaagagaacttacattattcaggtacctattatgtgctattcatattggcacataataggtgcctgaatatttggcaagcaatatgccaagatttttgctgtgttccttaaaggtcacattatggcaaggacactgaagctctctagattagatctctagaaaataataaacgtcattctttcttcttctgtcaccttcctgtgtgtgtctaagactcaggcttaattgtctacttcctatataaattcagttccatgccatgtcccatgccctgctggctttatcccagacatgaagtgccctggcttactcagaaagatgagtgcaggcccctcttccttggcttctacctaaggccagcagaactcctgagcctgtgctctaggggaggagcagggctggggtacactgaaggtattctgacgcctgctttacttgtcactgttgcttcccttccagtaatttccaaggcagctttcttggaaaagaaacctgctttaattaagaacccctggaaattctgagcaatgttctacttaaacctagcaaaaccctacttgcaacagagaacaggggagaaagggtgggtaggaggactgatggaaatggctccacatgatttgattctgtgaccttcaaagtctgaaaaagaaaatcaggttgattcataaacaactagggactaaaatacttctggcttccttttattgtacttctgggaaccaaccgattatgtttagaactctgggtgactggaagggttttgttgcttttttttaaagctggtcctgaaaccataatcagttttctaggctgttcattttggcatgtgcaggttgaacttttgtcactcaatcacaaaggcatggaagatgttcagtttcaaagaaggaagccaatccgtgaccaaggccaccaaatccaacaccaaaaacaaacacaaagggctgcattcccacacgtcaccactggcccatttccagagcagatcctgacggatgagaggcagcagggaggagatgctggcttgctgcagggtttagcagttaatctcaggtggctgaagcatgccttgtgcttcaaccgaaaggactgagacacggagatattaaacaaagcctgtgtaacccttaaacaaacagagaagggagccaagaattgctgtagtcataatcccttattctacagcatccacggtgttcaaggcatcttcatcaacagtatgtgttttgattgattcctcattataatccaagcagttattattaatatttagccccatttctcaaagctttgtggctgaaagactgccaggaccgacgttctttctagaaaaaaaaaataggtattctaaaaacaattagagaaaactttagacatccctcccacaaaagagaaactttccccacccatgctgcaggtccagaaatgtgcccactgccattatccttctaaaacacatgcacacaagtactgaagagtaattgttttttatactttgtttcttaatctaatgctttatacaaggtcaaaacttgaaagatcatctacaaggtctattaaaaaacactttcttctcatttttgggttctactaaatttggaaatccaatttaaagccaataggtaagggaataatatagtttcacacacttataattttatctcatctgcaaagaaacttcaaaactaaattccatcctggagtggaataacatatgcttgcccgtcagctatttgctaactctgtctaattttcagaaaaaaagggtgttgttctgtttctagatgttttattctgtagtgtatataaggttgcaatgtatttaaaaatttttttggaaatagatgtggtataaatcttacataaataatgacaattaagatctccaagaataatattattttatagctagaggtttggattaacaggcaagaaaacaaaaacaagagttttctaccaatgcgcaggaattttgtgttttaattttctcatctacaagaggtggtgcaacagcgctgtcctgggaggcaaaggaccaggagtccagtcttcctatgcttataccacatgcaacttccagcaatgcattcaatctctgaatagtgtccatcaaatggggactaaagacaccttatctatttaaaaacaaggagttggatcaatttgcttatagttcttttatttcttaagatctatggatccttcctcaaaacatttagctctaaaacaatcttgtagattaggtcaaatgcaaaccacaaaaccatgtctagtagctttttaacaatcaaacctccacatgattttgcactgatgctagagagagtgaagaaggtggcagtctttctgtccagttctcataaactattgctatttctaataaagtaacctaagcacctgctgtggataaggccccaggaaagaaaagtttgctgcctctagactaataaagagaactgaccattgatcttagagaaatgttaatttccaagcgagtattttttaaaactcctcctttgcttttatgtttcctaggttaccataaatagaacctacacactttatttgtaccatcttaatgtcttcgattgaagtgctgtgtccttatcctagattcttagctagtctcctagctcctggaggaaagcatctatttcttactcacctttatatcctacatgacgctcaactcagtgccctgcctgcagcagggacatagaaaaggttgaactgattgacctgacttcctaattacccagctgactctttagcttttgctaaatgtttcttagtcctaattaagagccaaagcattagctgggtacggtggctcacgcctgcaatcccagcactttgggaggccgaggcaggtggatcatgaggtcaggagatcgagacgatcctggccaacacggcgaaacctcatctctactaaaaaaaatacaaaaaattagccaagcatggtggcgggtgcctgtggtcccagctactcaggaggctgaggcaggagaatggcgtgaacccaggaggcagagcttgcagtgagccgagattgcgccactgcactccagcctccagcctgggcgacagagagagactctgtctcaaaaaaaaaaaaaaaaagaaagaaaaaaagagccaaagcattgagaaaatttgctaacgactaaaaacagcaataccaaatgtagcaagccctaggctagcatgtattatgtctttctcaaggacagatgagaaatattaaagtgttcatcaaaatactataaaaagcttcatttcttcatctgttcctatcacagatcagggatcccatttggagttcatctgcaatttcagatttgcatgagaaaggcttcattgcaaagcatcagcttcatttggcaaattcaaagtatctaggtaaattgctcattctttttgcatttgtaaattctttttccaaaattgcttttaataatttagtctaattcttactaaaggtttgacttgggaatttttatttttgtttttcctttttttttgagagaggatccttctctgtcacccaggctggaatgcagtgctgcaatcatagctcactgcagccttgaactcctgggctcaagtgacttgggggtttttagtgtattctgaagtagaaggtgtaggaaaacagaaaaagaatataattatccttacaaataagtgatgcacatagaagatatacagtttgtttaatatctccagggtggcagccaggaggcttaatttcagaatttgggaaactttatattaaccatagggttctagtagctgttccagtagtttttcctgtggtttgatatgtcttcaataaagggatgcctgccaatcagccataatacctctttaaacttttatagaatcaatattaccattttgatccatcagaggaaagctgtgtggctttttgcagaatccactcaagtgtcctcctgccactcgccctctgctggggcccagcctgaagccagcaaacaacaaaaaaacaaaaacaaaataaaaggaacctcttctggcttcttttcatgtttacacaatactgtgggaatgagaaggtagctactccgtttgccaagcagagaagagcgatgaaggatcagttattgtgtaagagcgcagtgtatataagcggattattgcttgcattctgtataaagttttcctgtaataacaatgaccgatttagttcatttcaagctattcatatccttggatttatttttaaggtgggaaaggaacagcagaaagggtgccatgggaaggagggagaaaaatataaaacaatacagcacccagacagacttcccagcgccacggcagaagcacgcccaacacatggctctgggctgcgatgggctggccagatgatgagcttcagggtcatcaaaggagggagaaatgaggggttgcctgaatttgtgttgattggtgcactgcacagagcaaggacgaaatgtaaagctcaaagggaaagggtggagccgaagaggaatgatattgctgcagaaactgtgcagctctcgaggtgtgcggtgtcactggcaggcagcccgtcacctggaagaaaatgtgaagcatgttccctgcagacaagggtggtacactgtaaacaggcccgtcgctcgctcgctcgctcgggagacaggggagttggtatttacctttcagagaccttgggtcaccctgcctcaccctgaaagaaggaaatgtctctcacacttaaaaatcttaagtgcataccacaaaactcaaatacagcccatgacgggcagagcgctcaatgaaaggtgacagatttagcagaagcatttatgtgctaataagttctgatgacttccagaggttaatttatgtccttttcccaggagtcagacttatttccctatttaagaggtaaatcgattattagaatcagactctttttaaccttcaaagcaaaaatgaaaataggtaataactttctacccaggcgggccacctgctccccaactatacacagacaacctcgggtgctaagagtgtttaaacatgttcatcagattctcctaaagcagtaacagccaggcatgggctgagacagcattttggaatgtgtttgaaatggtgtaatcttccatagtgccctatctttattgagggagaaagagagagaaaactaattgagaagtaagaagtgagtgggcagtttggtagaagcagccacccatttgattttgtaagattttaaggaaagaaagaagattttagatgaaaatgtatgactgcccccttcaatctccttgggtagatctatacctaatccagctaaatatacttttggctgggcgcggtggctcatgcctgtaatcccagcactttgggatgccaagatgggcggatcacctaaggtcaggagttcaagaacagcctggccaacatggtgaaaccccatctctaccaaaaatacaaaaaattagccgggcgtggtggtgcttacctgtagtaccagctacttgggaagctgaggcaggagaattgcttgaacaaagcaggcagaggttgcagtgagccaagattacgccactgcactccagcctaggtgacagagcaagactctgtctcaataaataaataaataaacaaacacactttttttcttcactaaaatacttcacatgattggcccatattggagttatttatgtgcctgtctctccccctaaactacaggatcttagaagacagcacaccttttgttttaattttctttcacagtgccaagcaagttacctttcacacagtagacattgaatgaatatttcctgatttaaaaacatgattttcagaaaaagaaaaagggtttaaatgggacacaagaaaagataaagcatccaaagagttagatactgtgcaaacagacttgataaataccgttccagaaaaccagcttccaaatcaaggcctgtttaagaaagagcatttttcgagaaaagaaagagaagaaatctgggtgaaaatgaaacagcagaaacaaaatattatctgttgatatatcataatatatcccttcatttatgcacaaataattttccttcctaccagtaccctcctcgacacacatacagacttatttaggatgcatcagaaccatgcctatgagcagaaggcagcgggtaagcattgagaagaacttcaagtccacagggcctggtaaaggaggcagctgtgaggcatgggggtgacagtgatggtctcagaacacactagtggtgaaggccacaccagcaaaccatgagaacaggatattgtcagcagatgcctgagtagagggacatatcttcaacagatcagtatgtatcaatgaataaaatatagtactcagtgcatagcattttaccttaaagataactcagctgaaatacaagtcttctctgtcataagggatacctctaggaccaaaaccaccaaccagaatggtcaagccagaatttccactattcaggtgttgatctgatctcttggacaaagcttgcttaagatcacaggattcaggagtttctccagggaaaagagcctctgcattttatccacctcaccaccagggccaagaacgaagcctcatataccggcatatctcactttattgcacttgactgatactgtctttttttacaaattgaaggtccatggcaaccctgctttgagcaagtctattagcaccatcttttttttttttttcaacaacatgtgctcatttcgtgtctctgtgtcatattttagtaattctcacaatactttaaaatttttcattattattacatcttttaatggtattcggtgatcagtgatctttgatgttactattgtaattgttttggggcaccacaaaccgcacccatgtatgatggaaaacttaatccataaatgttgtgtgtgttctgatggctccaccaaccagcagctgcttcatctccccccattcctctctttggacctccctattccctcagacagaacactattgacatgagatcaaataataaccttaaaatggcctctaaatgttcaagtgaaaggaaaggttacatgtgtgccattttaaatcaaaagctagaaatgattaagctgaatgaggaaggcatgtcagaagctgagacaggccaaaaactaggcttcttgtactcaatagtcagcgcagttgtgactgcaaaggaaaagttcttgaaggaaactaaaagtgaatacacaaatgaaaaggaagtgaagcagcctccttgctgatatggagaaagtctgagtggtctgggtaggaggtcaaaacagccacaacaccctgttagccaaagccaggtttgagcaagaccccaactctcttcaattgtgaggaagccacagaagaaaagtgtgaagctagcacaggctggttcatgaggtttaaggaaagaagccatctccacaccataaaagtgcaagatgaagcagcaagtgctgatggacaagctgcagcaagaagtccaggagatctagctaagatcatggatgatggtgactattctaaaccacagatttttaatatagacaaagcagccttatattgcaagaagatatcgtttcatagagcagaagtcaatgcctggcttcgaagctacaaagggcaggctgattttgtggttaggagctactgcagctggtgacattaagttgaagtcagtgctcttttaccattccaaaaatcctaaggtccttaagaatgatgctaaatctactttgcctgtgctctagaaatggaagaacaaagcctgaatgatagcatttctgtttaccgcatagttttctgaatattttaagcccactgttgggcctacttctcagaaaaaaaattcttttcaaaatattactgctcattaacaatgcatgttgccacccaagagctttgatggcaatgtacaaggagatgaatgttgttttcaggcctgctaacacaacatccattctgcagcccatggatcaaggagtaattttgtctttcaattttcattatttaagaagtacatcttatgtccattccaagatggccgaatagaaacagctctggtctgcagctcctggcatgatcaacgcagaagatgggtgatttctgtatttccaactgagccgccgctggtgatacccaggcaaatagggtctggagtggacctccagcaaactccaagagacctgcagtgagggacctgactgttagaagaaaaactaacaaacaggaaagaatagcatcaacatcaaccaaaaggacatctaaaccaaaaccccatctgtaggtcaccaacatcaaagaccaaaggtagataataccataaagatggggagaaaccagagtagaaaagctgaaaattctaaaaaccagaactccccttctcctccaaaggatcacagcccctcgccagcaatggaacaaagctggaaggagaatgacactgacgagttgacagaagtaggcttcagaaggttggtaataacaaacttctccaagttaaaggagcatgtttgaacccatcacaaggaagctaaaaaccttgaaaaaaggttagacaaatggctaactagaataaacagtgtagagaagatcttaaatgacctgatggagctgaaaacgatggcacaagaactttgtgatgcatgcacaagcttcagtagctgattcgatcaagtggaagaaagggtatcagtgattgacgatcaaatgaatgaaataaagagagaaggcaagtttagagaaaaaagagtaaaaagaaatgaacaaagcctccaagaaacatgggactatgtgaaaagaccaaatctacgtctgattggtgtacctgaaagtgacagggagaatggaaccaagttggaaaacactctgcaggatattatccaggagaacttccccaatctagcaacgcaggccaatattcaaattcaggaaatacagagaacgccacagagatactccttgagaagagcaactccaagacacataattgtcagattcaccaaagttgaaatgaaggaaaaaatgttaagtgaagccagagagaaaggtcgggttactcacaaagggaagcccatcagactaatagcagatctctcagcagaaactctacaagccagaagagagtgggggccaatattcaacattcttaaagaaaagaattttcaacccagaatttcatatccagccaaactaagcttcataagtgaaggagaaataaaatcctttacagacaagcaaatgctgagagattttgtcaccaccaggcctgccttacaagagctcctaaaggaagcactaaacatggaaagaaacaaccagtaccagccactgcaaaaacatgctaaattgtaaagactatcaatgctataaataaactgcatcaattaatgggcaaaataaccagcgaacatcataatgacaggatcaaattcacacataacaatattaaccttaaatgtaaatgggctaaatgccccaattaaaagacacagactggcaaattggataaagagtcaagacccatcagtgtgctatattcaggagacccatctcatgtgcagagacacacataggctcaaaataaaaggatggaggaagatctaccaagcaaatggaaagcaaaaaaaaaaaaaaaaaaagaaggcaggggttgcaatcctagtctctgataaaacagactttaaaccaacaaagatcaaaagagacaaagaagaccattatataatagttaagggatcaattcaacaagaagagccaattgtcctaaatatatatgcacccaatacaggagcacccagattcataaaacaagtccttagagacataaaaagagacttagactcccacacaataataatgggagactttaacaccccactgtcaatattagagagatcaatgagacagaaggttaataaggatatccaggacttgaactcagctctacaccaagcaggcctaatagacatctacagaactcttcccctcaaatcaacagaataaacattcttctcagcactacattgcacttattctaaaattgaccacataattggaagtaaagcactcctcagcaaatgtaaaagaacagaaatcacaacaaactgtctctcagaccacagtgcaatcaaattagaactcaggattaagaaactcactcaaaaccgcacaactacatggaaactgaacaacctgctcctgaatgactactgggtaaataacgaaatgaaggcagaaataaaaatgttctttgaaaccaatgagaacaaagacacaatgtaccagaatctctgggagacattcaaagcagtgtgtagagggaaatttatagcactaaatgttcacaagagaaagcagcaaagatctaaaattgacaccctaacatcacaattaaaagaactagagaagcaagagcaaacaaattcaaaagctagcagaaggcaagaaataactaagatcagagcagaactgaaggagatagagacacaaaaaacccttcaaaaaatcaatgaatccaggagctggttttttgaaaagatcaacaaaattgatagaccactagcaagattaataaagaagaaaagagagaagaatcaaatagatgcaataaaaaatgataaaggggatatcaccactgatcccacagaaatacaaactaccatcagagaatactataaacacctctatgcaaataaactagaaaatccagaagaaatcaataaattcctggacacatacaccctcccaagactaaaccaggaagaagttgaatctctaaatagaccaataacaggctctgaaattgaggcaataattaatagcctaacaaccaaaaaaaaatccaggaccagacggattaacagccaaattccaccagaggtacaaagaggagctggtaccattccttcagaaactattccaaacaatagaaaaagagggaatcctccctaactcattttatgaggccagcatcatgctgataccaaagcctggcagagacacaacaaaaaaagagaattttagaccaatatccctgatgaacatcaatgtgaaaattctcaataaaatactggcaaaccgaatccagcagcacatcaaaaagcttatccaccatgatcaagtcggtttcatccctgggatgcaaggctggttcaacatatgcaaatcaataaacataatccatcacataaacagaaccaacaacaaaaaccacatgattatctcaatagatgcagaaaaggccttcaacaaaattcaacagcccttcatgctaaaaactctcaataaactgggtattgatggaacgtatctcaaaataataaaggctatttatgacaaactcacagctaatatcatactgaatgggcaaaaactggaagcattccctttgaaaaccggcacaagacaaggatgccctctctcaccactcctattcaacatagtgttggaagttctggccagggcaatcaggcaagagaaagaaataaaggtattcaattaggaaaagagaaagtcaaattgtccctgttttcagatgacatgattgtatatttagaaaaccccatcgtctcagcccaaaatctccttaagctgataagcaatttctgcaaagtctcaggatacaaaatcaatgtgcaaaaatcacaagcattcttatacaccagtaacagagagagagccaaatcatgagtgaattcccattcacagttgatacaaagagaataaaatacctaggaatccaacttacaagggatgtgaaggacctcttcaaggagaactacatacaaaccactgctcaacgaaataaaagagaacacaaacaaatggaagaacattctatgctcatggataggaagaatcaatattgtgaaaaatggccatattgcctaaggtaatttatagattcagtgctatccccatcaagctaccaatgactttcttcccagaattggaaaaaactactttaaagttcatatggaaccaaaaaagagcctacattgccaagacaatcctaagcaaaaagaacaaagctggaggcatcatgctacttcacttcaaactatattacaaggctgcagtaaccaaatcagcatggtactggtaccaaaacagatatatagaccaatggaacagaacagaggcctcagaaataataccacacatctacaactgtcagatctttgacaaacctgacaaaaacaagaaatggggaaaggattccctatttaataaatggtgctgggaaaactggctagccatatgtagaaagctgaaactggatcccttccttataccttatacaaaagaattaattcaggatggattaaagacttaaatgttagacctaaaaccataaaatccctagaggaaaacctaggcaataccattcaggacataggcacgggcaagcacttcaggactaaaacactaaaagcaatggcaacaaaagccaaaattgacaaatggggtctaattaaactaaagagcttctgcacagcaaaagaaactaccatcagagtgaacaggcaacctacagaatgggagaaaagttttgcaatctacccatctgacaaagggctaatatccagaatctacaaaggactcaaacaaatttacaagaaaaaaaaaccccatcaaaaagtgggcaaaggatatgaacagacgcttctcaaaagaagacatttatgcagccaacagacacatgaaaaaatactcatcattactgatcatcagagaaaagtaaatcaaaaccacaatgagataccgtctcatgccagttagaatggcaatcattaaaaagtcaggaaacaacagatgctggagaggatgtggagaaataggaatgcttttacactgtaggtgggagtgtaaattagttcaaccattgtggaagtcagtgtggcgattcctcaaggatctagaaccatttgacctagaaatcccattactgggtatatacccaaaggattataaatcatgctactataaagcacatgtatgtttactgcagcactattcccaatagcaaagacttggaaccaactcaaatgtccatcaatgatagactgaattaagaaactgtggtatatatacaccatggaatactatgcagccataaaaaaggttgagctcatgtcctttgcaaggacacggatgaagctggaaaccatcattctgagcaaactatcgcaaggacagaaaaccaaacaccacatgttctcactcataggtgggaattgaacaatgagaacactgggacacagtgcggggaacatcacacactggggcctgttgtggggtggggggctgggggagggatagcattaggagaaatacctaatgtaaatgacgagttgatgggtgcagcaaaccaacatgacacatgtacacctatgtatcaaacttgcatgttgtgcacatgtaccccagaacttaaagtataaaaaaaaaaaaaaaagaaatacatcttataaggtcatagctgccatagataatgattcttccgctggatctgagcaaagcaaatggaaaactttctggaaaggattcaccattctagatgccattaaaaatattggtgattcatggaaggagatcaaaatatcaacattaaaaggagtttggaaaaagttgattccaaccctgacatatgacggtgaggggttcaagacttcagtggaggaagtagggacagatttgatggagatagcaggataactagaattagaagtggatcctgatgatgtgactgaattgctgctttctcatgatcaaactaagggatgaggagttgctttttatgggtgggcaaataaagtggtttcttgagatggaatctactcccggtgaagatgctataaacaatgttgaaatgacagcaaaggatttagaatattacataaatttagttggtaaagcagtggcaggatttgagaggactgacttcagttttgaaaggagctctcttacgagtaagtggctatcaaagagcattgtatgttacagaaaaatctttcatgaaaggtagaatcaattgatgtggcaaacttcattgttttcctattttaagaaattgccacagtcaccccagccttcagcaaccaccaccctgaccagtcagcagccatcaacatcaaggcttaacccttcatcagtaaaaagattacaactcgctgaaggcgcagatgatcattagcattttttttttagcaataagatttttttttcttcaacttttattttaagctctggggtacatgtgcagaatgtgtaggtttgttacacaggtaaacatgtgccatggtgctttgctgcacagatcaacccatcacctaagtattaagcccagcatccattagttattcttcctgatgctctccttcccccggtgcccccagtaggctccagtgtgtgttgtttcccctccagttgtccatgtgttctcatcatttagcttccgcttattagcgagaacatgcagtgcttggttttccgttcctgcgttaatttgctaaggataacggcttccagctccatccatgtccctgcaaaggacgtgatctcattcctccttattgctgcatagttttccatggtgtatatgtactacattttctttatccggtctatcattgatgggcatttgggttgattctatgtctttgacgcaataagatatttttaaattaaagtatgtacatttttagacataatgctattgcacacttaatagactgccgtacggggtaaacataacttttatatacactgggaaaccaaaaaatttgtgtgattcactttattgcaatgctcactttattgcagtggtctggaaccaaaattgccatatctccaaggcacgcccatgtagaaataaccaagtaaacatctgtcagaattggaaaggaagacaacaaagcagaaaaataattaaagaggaagaaaaataccatcaactgaaggagttacagttggttaattggtgtggggagctgaagaaattaatagatgacaactattgtcacattttttaaaagaatcattatttcaaaatgttgaataattattttaattctgcacacagcatagaaacaaagaaaacgtaattaaattgcaaagcgaggaacttcaattggacataaagaaagcttgtcaataagggtaacagcaagagagcttatgcaccgtgcatccctgcagatgtctaagaaggtaattattcttcgtcttagtcagattaggtatagacctacccaagacaagcagttgaaccaggaaccatttctgctcccttcctgatctctgatttgattcaatcttctatttgcttatcttctaaatgtgcttgtaataacctgcccttttgctagcaccttcttgtaaatgtgatgcctatctgggtttaacccagctaaataaactgaattcaataaaacccatcctgggttatcctccaggagagttattactccactaacatgctactgttgctactgttacctaatgctttaacttctcctttaggcttgaattatgctacattattgtatatctaagataagaggctgtctggagtctgttcaatgttatcgcgtaatacacagtgacttttttattgaaggcactccatgattccctctgcactaatgcaggttttactgaaactaattcaaaaattgtgtgtatgtgtgtgtgtatgagtgtgtgcacgtgtgtacacacatatatacatatatttgagaatacatataaagataaatgctaaattgaaaacaaagtcacaatgcttctctctgcagctgagaatctacaatcatctgtcagactgctatgccccatgctatattaatctagcttttaaagttgaagagatagcaccacactgggagcttgctgtctctccatgctgaccaacaagcctctgccaaacttctgccacttcagatccttgagaatgcggcaattcctaaccatgaggtccccagactcctaagccttcacagagttaaaaatggggtatttggaaagagtatcagtgtttcaaaaagcctacggaaattttacattgctacaaagactgtgataggctatcaggctgccttctttggttttgaatgttatcaactctttgaataactgtgattatctcatacttatcagaagctttggttgacatcatacattattttgatgaataaattacgagggtaaattaattattccttaaaactgtagtttgataggagaaaaatatttcaaaatatggtgtccaataaagaaaaatatatataagtaccctagtgaaaaaaggttgggtacctcaaccatgaaaacagtacatgaaaggaaaaacattgacctgggatttagggtaccagcccttgctccattacttaataaacgaaagtataccatgattgcctatgacataaagtccaacgcaaaagataaaaatccatgctacacttcagttttctgccccgttgattcagggccaaaatttagcattaacttgaaaaattctataactatttgttttcaaaatagacctagatttctgaggtaggcagagaaatattttatgtctctttctcctactaatcttcttctatctatttagagaacacaactttcagggaaaaaattgtgcaatagtcgggtggaagatcagtgttagcatttctatgcttccaaccgaggacaaaggtaggaagtgtttctgtaactttttactgtggaaactatgagctttagtccacttcatcagttctgagtttcaaggaaacaaatcactggagtaggaaaagatgtcacctgaataagcaaaattgccataggggaatgccagcttgaaactggaaatttgaccagtaaccctctgtaaagctgtgctctaagctgtagatcaaatcaagaattgtgaccatcacataatacagaggttgaaggcagaaaaatccacaaattttatttgtcaaaagtgttgacagatctcccctgattaagagatgagtacaaagcaaaaccatcagaaggtgtatggaaagcattatagcagtggtctgaaagtagcaccatgaagattctaaggccaaagattccattcaaaattatatgctgcagaatcagaaaaacaactgttgaaaattgtttggtttcctcaatagaggacaagaaggaatgaccttaccaccaaaaaccaagaccagaaagtcataagaggagagagaagctgaatagaaaaggcagcacaggttgaacaggcaacaacagaggaagaaagatgaaggggggataaaaagaataatttcaaggaaatttttttttttgagatggaatctcgtctgctgacatgctggagtgcagtggcgccatctcagctcactgcaacctctgcctcccaggttcaagcgattctcctgcctcagcctccagagtagctgggactacaggcatgcaccaccacgcccggctaatttttgtatttttattagagacgggctttcactatgttgatcagtatggtctcgatttcttgacctcatgatctgaatcaacagaattaaaatcatacttggagcaacagaaaactagaaaccaaatctgtaacgtgatttttcagatgttctctcagaatgaaaagcaaatgacaaagagaagaaaatgacatgagataaaataatagacagcagggagtagagatccaaaatatactcagttgggatttccaaagaaggaatgagaacaaatgaaatagaagctcagtgtgggtctttcccactagatcatgaagcccataaagatcaaatctggatttccagaatggctaagtgaaaaggttggcaaatcctctccccaaaaggcaatgataaagctgggaaaatttgtcaaaaacaaccactttaggactcttgaatttgtccaagagtatacaacaaattgagaagtttattcacgacaaactactggaccaaggtaggaaacttgtgctcctcccattctcctacccacctccatgcccagggcattgatgaaaacaacaggaactctgtggcaaacattcaggaaaggtcaacattgcagctagcctgaggtcacgattctggtagaggtaagcaacagaccaggagaccaaccagaaattcaacagagagaactggaaataggaaagctatagtgggctttgataagctttcgcatattcctggtgatgtagaatgtcaattttgtcaaaatatcaacaaacatgacaaacctataactaaaatgaccaaaaaaaaaaaaagaccagtagacacaaactatcaaaatcagtaatgagaaagaggacattactactaactttaaaataaaaggatataaggaaatactatgaacaaaaactttatgctaacaaattggacaacttacatataatagacaaattcttggaaagacaaaatttactaaaactaactcaagaaaaaatagaaaatctgattagatttatagaaagttaaagaaactggattattaattaaagtattgacacaaagaaaggcacaggcccagatggcatcactgactaattccatcaaatatctaaagaaaaactatactaattcttcacaaactcttgcagaaaatagagaaggaaatacttcctaacctattctaggagtccagtgttaccctgacaccaaaaccagacaaaaacataacaaaagatactacttcccacttactagaatggctgcaataaaaaagagacagacaataacaagtgatggcaagaatgtggagaaactggaatcctcacccattgccagtgagaatgtaatatgacacagctaccatggagaacagtttggcaatttctcacaaagttacacataaacttatcacatgacccagaaattccactcccaggcatatgcaaatatttatggcaacataattcttaatagtcaaaaagtggtaaccactcaaatacacttcaaccaacgtatgggtaaataaaatgtggtctatccatagaaaggaagattattctgccataaaaaggaatgaagtaccgatacatgctacaacatgaatgaaatggatgaaccttagaaacactatgctaagtgaaagaaaccagatgcaaaagaccacaggatatatgattccatttgtataaaatgttcagaagacacaagtttatggatatggaaattaggatcatggctccccagagctagaaatgagtgggggtaggggaatgactgcaaatgggtgcaagagctatttctgtggtgacacaaatgttttatcactggattgtggtaatggttgtaaaactctttaaatttaccgaaaatcattgagctgtatattttaaatgggtgaattttgtggtttgtaaattatatcccaataaagctgttaaaatatttttaagattaaaaaaatcagatgacatgttcactgctgcatctcagcatccagcacagttctggccacatagtaggtacttagcaaatgttgactcaatacgtgaatgaataagggagtggagtaatatcgaggagtttgcactaaaatgattgcatggcctacagaaagacctatgcgtttaaaaagattcatcatattccagggggaaaaaaacaactaatgaaggctaaaactttttaaaaagtactctattaaagaagaattgctgcaagaatttggagaaaagaaaaaagtttacaaagggtagcctcatatttcttctatgaaaaataaatatcagaagagagtagacgaacatatacaaatttttaaaggggaaagaatgaccgtcagacattttcttccccagctaacttgttttttcacatgggaaagacattctgaaatgtgcaagccttttaaaaatacatctactatatactcttgaaaacgttacttaatatcagatacgataggctaagaaaagctacaattaccaacaaaccccaaacctcagtggcttaaaacaacacaggttattctttgacaactattagcacctttagagggagttggagtcatctgctgactgctgtcactcagcagtttaggcagctgaagtgtctatcttgagctttcccagaaggaagagaggcctggagagttccccttgccaagtccattcatagctcactggctagaactagccacatggccttaccctaccaaaagggggctgggaaatgcaatcctaccaggtgtctgaagaattaagaaaaggtagaaagaggaagacagaccggtcattgaacctaagaatgaaagaatagcagagcggcagagcatcttacaaccggcgctccctccacccaacagaaggcagcccaggcccggcatttcctgacttccagcctagcaacagaccacaggcacgttctttccctcagatcgaacgaatgggaggaatgggagtcccacaataacaaatgacaatggctgcattattgtgaaagcttaagatttatgcactagcgtagggtggatgtccttgatcggcacagctctccgcaccatcactaaaagactcaagagtctttccctcttgtgactttgcattcccctaggacgtcatcattgcctgcatccagccagacagacagaagggacagagtttggagaaattgttgagggagatttttattggataagcatgaaagtcacacacacgcgcgcgcacacacacacacacacacacacgcttatgatttctcggaaacagcttagcaacatggccaaacctaattgcagatgaaactgggatagctacctccgttcccaggagaaaagagaaaatgtatttcatgcacacttggtcatccccttcaaataaatcaatttctataacatataaactatatctttgttcatccgaaggttagcatcaaatatgggaaacaaagaaagaagcaatcctcattagatttaggaacaagaaaaggaggagtgctttcatcacttttttcccacatagtcttggaggaaccaaagtaaacatatattagaaatataaattttcaagaagaagagacaaaattaccttatttttcaggagttgtgattattcacctgaagaaaataaaggaatcaactgaaaactcatttcaaacaataattcacaagatggatgcgtgtaccaaattaacacaaaaattattaaccttcctacatacaaacaaaaatcactggaagatatatttgaagagaaggcaacaattaaaaaacaaatgaaaaggagaaaatatcgacaaataatatttaaaagaaaagtagtaatatctgcataataagatgtttataaaactattgaggaagaaaggaaaaagaaaacccgaacaaaacaaaacaaaaaggcctaccaagtttttggactagagggtgcaaaatcataaagcatttcctcaaattaatacatatattctataaaatttaaattcaaacgccaacagttgaaaggagggagaagaagactagataagccaatctagaattcaaatggaaaataaacaagaatcatcaggacaagtcagaggaaaatttcaaaagttatagggcaagagtggactagctatacacattattcaaatagcacatatattagtttcctatggcttctgtaacaaattaccacaaactcgaaccataccaatttattagcttatagttctggaggtcaggagtccgaaatgggcctcgttgggctaatgtcaaggtgcaggcaggggtgtgttcctttgtggaggatctgaaggagaatctgatgcttcacctcttccatctcctaaaggccattgttttccttggctcacggcctcatcccatcgtctttgaagccagcaatgtttcatttctctaaaatttttctgtagtcatgcttccctcttactctaaacacagatggaaatgtgtctctgattttatgtccacatgattagattttgcccatccagataatctaagaaaatccctccatctcaaggtttcaagtttaatcacatctgcaaaatcccttttgctatgtaaagaaacacatttataggtaccagggattaggatgtggacatcttgggggtggagggatgaggggaaggactttattctgcctacttcatcatgattctgattcatgtatagacagaacaatgaaatataatagaaaatatcatagaaatattaaagaaagtctagaatagactacagcaaacatacggtgttaatctattataaatgccattttatatcagtggcaaaattgcttattcaacacttattgaaataactgtattagaattggaaatgaagtaaattggataccaccgtatggcactacaacaaaattaattccagatggatcaaagatttaaatgtaaagaaatgaaaccataacaaaattagtataaactgtggaggaatattttataacctttgagtgaggaaaccataaaagaagatattgataaattcaactacataaaaattttaaaatatgcatggtaatagaataccataaactaaatcaaaacataaaccaagaactgtatattttttaacttcaactcatttcattgcataaggttaatatccttaatatataaagaactcctatgaatcaataaaaaagaacccaacagaaaactggacagaagttgcatataaacagttcaaagaacagaaattcaaattgctcttaaacacaagaaaatatgttcaacctcactcataagcaaagagatgaaaatccaccctgagatacctttttttgtaacctagcagatggacaatgataactctgataacacattatgttaatcatggtatgcatacacaatactggagtagatgtcaattgataaattctctgagaggagcaatttactcaaactaaaaatgcacatacactttgataaagcaactctatttctatgaatttatgtgctaaatatataatgggcaaaatagaatgtgtacatggcaaatagaatgtgtcagtattgttatagcaaaagattgaacataaacaaaatgcccaataggttcttggttaattataataatccacatattcagatactctggaatactcttcagctctccaaagaataaagtagcttcttcatactgatataaatggatcacctagataaattttaactttaccaaaatgcagaatagcagacagggcaagctaacatttgtgtcaaattacagaccagatgccaaggccaagtaggaataatttttaaattatatgttttcctctttttgccttgaatcatcaaaggttgattacaagtaaatttctgatattaaatgtcaatgttataaatcatcttttaggcatggtaataggatatcaagcgtaagccagcaggattttgcatggggagttcccccctttccttccacctttccctagcaaatattctgggaaacgaggcacattttttcctgaattaagtatgcttcactgtgacctcattctctcttcattcatcagacaccccaaacttgacccgcaacccaaactgcattcttttcccgttggaccttaaagtttcaggaaactgatattttagccacacacacaaaaaagccttcaatctaaagattagtttttacatgttctctaaatagttttgcaaaatcacttggcaaagtgtctgagaatggttataggttgttatcctacctgccttaattttcaaagatgctatacattatgaataactggaaaggaagagtttctgcagtttatgggtacatctgttttcaaaacctattttccagaatgattgttgactccttagtatctgttcttttcctttgcttattagatatcctgcatcagaataatgattcagcaaagtaatacagctacagactgtctttcattcttgatctggctgatcctcatatctttgtctaccaggaaatataatcattaaaatgaacgtcctggaacatggataaagaatgacacttttcccggagatacaggctttataccagggcaacccacacattttgttacttggctttcttttccatacaaggcacagtggacaccaatctttgtggccctataactcatgatggcttcctccttctctgggaataatcccatacacagataatgtgtttataagacttaatagattctgctcctctatggcaagaggaacagattctataagattctttataagattaaagaatctatttataagagtctgctcctcttgccatagagatacattgatggacaacccaactggactaatcagccctttccccatatttttgtctagaagtaaaggaagagaggcagcctctctgtgggagttggaaacacaggatgcaagacccaggagcagctgcctgcctgctatggtttctgctacacagagaaagcttatttgcagtaggcagtatttaaggcaacaacatagagacaagcagaaaaaaagacacatgaaagggaggcctaagggctttgacatcttggttccagtggaccctgggtctcactacgtccttgtctttgccataattatgtgaaatattccaataattattctctaaatgatccacttggcctaagctagtaggtggagttgggtttctctgagttccaaccaaaacagttctgactaacacaccttgcttacatgacaatatccacctgctcagacatccctccctacacatatgtgccctgggtttgaatccttggccccactatttaagagctgtgtgaccttgggacagttaggtaaacctctttagcctcaatttactcatctctttgatggaggtaatgatagaatccatctcaaaggattattacggagtttcaatgagtgaataaatgaaaatttgcttataatagtgcctgaaacacagtaagtggtcaaaaagttagctattcttgttatcatatatcattatacctatatatatgtaaaatatattataaatatattgtaaaatatattgccaaaatatattgccacataatctagtaatatgtttagagcaataatgaaacttttttgtatgctttttatatgccagacagtgctgatataatcatttcatttaatgctcacaaaacctatgaggtagaaagcattattatccccacattactaagaataaaatcacatacataattttttcagtcttacagctagaaattagcaggatcagtcattggagctatgcctttgacttcaaaacctatgttctctttttttttttttttttcctaaccttttctgagtgttgctggggtgggtgtaatatatgagtaataaaaaatgtacaaaatctaaatgttccaccaaatgaattttcacaaagtgccctccacataaccaccactcaggccagatgcccctcaaagtctcctctcagtctctctctcttgccctcttccctgaaaaaatcactcttacgatgacttgaactgagtcaaattagctaataaagaactacatttcccagaattccattatgattccagttaaggttggttgcaagagaaattggctcaggatttggaaggcaggaataaaacagtagccgttcagctatgaaagtcactgcaagacaccaggtacagctccagctcatgcacattgatactgctggctccccacattggcctgggacagcagcctggcctcatctccttcagttcccaccaaacctcctccttcagctgctcccagcgctagcccaggtgtctgtgcagctccatggcaaagggtgtagcaacttctgcaggtcaccagcaccatcaaggtcagaaacagtgagagaaaaatacaagtaacaggttgccctcatgggctcccggtcttgaggccatgcaatagtataagtctgtgagattcatattgttgcaagtaactgtagtttgttttttttttctctgccatttcatatattgtatgaatggagtacaattaatttaccagttttagtgctgattgttaattggggtgtctctagggtaggtttattgtgaatactactactcagaatatttttatacctatttattagtgcatatagcaaacatttctgttgagtatgtaactaagaatggcattgctgggccatagggtatccatatgtttaactttaatagaaaataataagccatttcctaaagtctgtatgccattttccactcccaccagtagtacatgcattgcaaatattttatcctacactgtagtttgcttttacactctttttaggggagtctgtaaatgaatagaagttcgtcatattaaagtgatccaatttatcaatcttttcctctacagttagtgctttttcaattctgtttaataaatctttctctaccccctaagacatgaagaaattgtcctatattatcttttggaagctttattgttttgcctttcacacacagatttgtaagttacctggaattaattttcatgtccaatatgaggcaggggttcagtttcatttattccaaatggtcataaaattgatctaccaccactcactgaaaagttgatctttgtcaaaaattaagtcataaatgaataaatctgtctctatgaataaatcagtctgtgccttctactctgctccatttatttctctctcatggcatcattaccacactgtgtaaattattctagctttagaatgtgtctttataaccagtaaaacaagttctactaccttattcatcttcttcaagagcaacttagctattcttggctaagttttagatggtttttccatctaaatatgaaaatcagcttatcaatttataccaaaaaaacctgtaaggaattgtaactgagattgactctatagaccaattgggagaaataactgacatcttaaaaatggtgagtcttttgatgcattctttaaatgttctcaattatggtttataattttctgtgtagacatcttaaacatcatttcaccaatgaacaaagtttgaggagaatcaaggtattttcatagtctcaaaatatctcccctaagatatctaccaatgacaaagggaaaaataggaaatttttacagcagggaaacctggcagacaccactgtaactaagtgatcaagcttaccatcatcagtaataagttgtatcaacatcaggcacctcctgatatgatgcagtatcacatctgtaatacattctcgccaaaaatgcataaccccatggaatcatgagaaaacatcagacaaatcaaattgaaagacatcctacaaaatacctgaccactaatcatcaaaagtgtcaagtttataaatgacaagcaaaaactgaagaactgccacagattggatgagactaaggagatgcaaaaactaaatgcaatatgggaatcctggattggatcccagagatgaaaagaacattagagatcaaactggcaaaattctaataatggttgtggcttagttaacagtattgtccaatgttaatctacttgttttaaaaaactgtattatggttatgcaagttgtcaactttaggaaaagataaataaagagtatgtgtaaatttctacgtcagttttgcgacttttctgtgagtttgaaattatttcaagattttaaaagaaagggaaaataaagtcatactggctcatgaaataattggaatcttctttgctctttttatattctctagagaagtttacacaagatcaacaggatttctgccttgatgtttggtagaattcatcagcaaaactatctggattagagttttttgtgggataattttaaattatgagttctatttaactaataattataaaggataagatttttctaatttttctcatgactatgtttactttgcctaggaacctattcatctatccattttatttaattttcaaatttgctggcataaagatttctgtaataccttatttttttgtattggctataggatctgtagtgatgtcatcttttttcatgtctgataccaactattttgccttctttttcccattcattcctgccatggctttatcaattttattagtcttttcaaataaagaaattttaactttttagaagctccttattttgttttttcttttactgatttattttcttttatttataattttatttttcctatttttttggttttaatttatgattattttattaacttcaagaaatagaaggccactggttttcagccttttttgttttctaatgtatttattttaggcagtaagttccctctaagtgaactttagctgcatccctcaatagttgatggcacgttttcattattatttagtttaaaaatgcttcctgggccaggcaaggtagctcaagcctgtaatcccagcactttaggaggccaaggcgggaagatcacttgaggtcaggagttcaagaccagcctggccaatatggcgaaaccccgtctctactaaaaatacaaaaattacccgggcatggtggtgtgtgcctgtaatcccagctactcagaaggctgaggcaggtgaatcgctggaacccaggaggcaaaagtttcagtgagctgagatcgcgccattgtactccagcctgggtgacagagtgagactcggtctcaaaaatacaaaacatgtaaataaataaataaaagtgcttactgcctcaggaacccacatgctcacctctgcagcacattccttctcctctttccacttctgaaatgcttccttcatctttggaatttataatgtaaaagaattttgctagacataggaaggacacgaaaaggtctctgccctcaagaatgtttttgaagaggtaagatgtatgaacaagatccaaaaaatcaatacacttgaaatatggtgaatgacatgagtagtacaattttttaaaatcctgactacagtgtttgggcaaaatttcatgcagaatgtggattttaactgaacttgtacttacggaaaggacttaggtggtgggaggaaagggataagggaaactaggatgagcagagacctagtgggtggaaagttcaaagagctgtttggggaaacaatgagtcagtgtggctcactgaagaatttgtgtgatgaaatgggagaactgcagttaaaaaatagttctgtcttatatatcatagtaatattgggtaaatgaatttgatttcatcttgtagagaatagagagccattttaaaatttagattggcaattgatacaaacaaatgactgggtacatggctcactcacacctgcaatcccagcactttgggagaccaaggcaggaggattgcttgagcctggaagctcaagaccagcctgggcaacatagtaagacctcatttctgcaaaatacacaaaaattagatgggtgtggtggcaggtactagtggtcccagatactcaagaggctgagatgggaggatcacttgagcccaggaggcagaggttgcagtgagccatgatggtgccagtgcattccagcctgggcaacagagccagaccctatctccaaaaaaaaaaaaaaagaaagaaagaaagagaaagagagagatgaaagaaaaagagagagaggggaaggagggaaggagggaaggaaggaaggaaggaaggaaggaaggaaggaaggaaggaaggaaggaaggaaagtattgtaggaatactgatcaggaggctcaagttggataaattgaaaagaacagaagctaaaagcaagaaaccaagcacatgttctaaggtctttactggcgtaagaataggaggaattaaaaagacaacaggataacctgtggagagggttggttggggggcatctcattgaccctttgggatcaatcccaaagaagattgactttagtgaataaggacacaagtacttctcttaccacatcaaagaaatgatgcatttgctatcaggctaaaaagagcagtagcagtatagagagcctttatcctatgtttagatgctttccttactttttttttttttttttggagaaaccactttcttgtattttggggtggtgtttctgcttttcaacatgtatgtggggaattgttgcaattttcactttgtcgattacattggccaagagatattgtactgcatttcaacctgatgccttccacatttgtatagatcacaaaccccatagttcaggaatgagccaaaaacatgccacatctgcatgatgctaaaggtcattcccttgaaatgcatcataccaaatggaatcttatttcttgccaaaaacgttgtgggtgtctgtcacaacatttatcttccttccatcaacagcagcagcagcaacatcataatatttcatgttcaaccttggatgacatcagagaaactctttagctcgtgtctatgggttttcaccatacaaccagaacctcaaggctcctgttctcacattccccatctcctcatcatcacagatcaaggttcactttctttgtaaactttccctttaaccccactcactaacaaaatcactgacttaactctcactacaacaaaattatatatttacaaatgtctatttctcttgcattggttggcttttgtcttttccattagattatagactatgaactgtgagtactgccaaaaatgtctcagactaacccgctaccattctttgatgatacgtgattatatatgaatttatcttttttcttcataactttattctctttctcccaaacccacccatgcatcattttcatgggctaatgtaatcagaaccactcctggcatttaggctagaaaacactgacaatgatgaggaaagcaagtatcctttaaacatttatcttttccgttgttatgctatagtcccctgaagctgcctgcaaaagccacaatattcttacggcagatggtgtcactcatgaaaattctggtgtctatgccaagaaaacttattataagaaagaaacggctgggcgcggtggctcatgcctgtaatcccaacactttggaaggccgaggcgggcggatcacaggtcaggagatctagaccatcctggctaacacggtgaaaccctgtctctactaaaaatacaaaaaaaaaaaaaaaaaaaaaaaatcagccgggcatggtggtgggcgcctgtattcccagctattcgggaggctgaggcaggagaatggcgtgaacctgggaggcggagcttgcagtgagctgagattgcgccactgcactccagcctgggcgacagagcaagactccgcctcaaaaaaaaaaaaaaaaagaaacaaacaaacaaacaaacaaacgtattttcccactcctctggtttctacgaggaagaattttcccctaagcacttctggcttctcagcctaccccttacttttcaccacagaaatagagtgaattacctgatttgatgaatctgggagaggaactggacactcacacttcagcatcttcttatcatcctcttcctcttgggagccagccatctgcagggtgaacgtgctcctccgtgctagaagttttccagggcaggccccacagacagcagcctgcagaagtgcagcactgcccaaggccaggtgggtcagtctcagtccaagtattttgtataagtaaagatgcccattttcactgcacacccaagcttctaacagctggcatcttggtttctatctgacctattgtttgtctttgtcataaaattactcagaaaaggagagtgtttactgagtccctctccagcggcaacagtgctaccagacatttggctggcattggcaggagttagtaagctcctaaggcaatgctgctctctgaatgtgggcaggaggacatccatttcctccctgaaagccgtgctgcagttaatattcacaatggtcactgtggtcccctatgctcctgtctctaataaacctccaggttcctctcatcctattgccctgtggcctgaggctacaaaccaatctcaaggaacacatagcatctcagtgatcaagtgacaccttccttcttaggggtagaggtttgtgttgctgtatccgctttgctgtaggtacagctggccctctgtttccccaggttccatatctgcaggtcaaaaatatttggaaaaaaaatacaaatagaaaagcgatatagtataacaactatttacatagcatttacatggtgttagacattataagtaatcgagagatgatttaaagtatactggaagggttgggcatggtggctcatgcctgtaatcccagcactttgggaggctgaggtgggcaaatcacttgaggccaggagttcaagaccagcctgggcaacatggagaaatcctgtctctactaaaaatacaaaaattagctgggcgtggttgtgcatgcctgtagtctcagctacttgggtggctgaggcatgagaatcacttgagccgaagaggcggaggttgaagtgaaccaagattgagccactgtgctccagcctgggcaacagagtgagattctgtctcaaaaaaaaaaaaaaaaaaaacatatgggaggatgtgcataggttatatgcaaatactatgccattttatatagggggcttgagcattcagggatttttgtatctatggggccctggaaccaatcctccatggataccaagggatgactgtagtttccagcagggagatcatcacaatggcatgttttttatgtttcagaggaaagcatcttctagtctatgaatgtacactctggagctgctctggatattggcaatgttgctaccaatctagaaatcaggaacctaaagacccttttctaacacactggcctagggtaagtcaactgagtgtggtcagagtctatctcaacatggagcattgcagccccagcgcctcacttctgagtgacccagagagcccagaacaagtggtaaaagtagacacaagtgaaatctcctttaactagttctttgctctcacctcccaccctcacccacctcgttctcaggcctttctttcttctatgcccagacctgtctaatgtatgcgaaaatagaatctcccaactttttctcactgagaccaactgagcttattatataatttcagctcttgttccaagaaaaccaagatcaatctaaaaaagcagtcatctgaacttggcagacattcgtgtgggaaagtctttaagcaaaaacaaatttgttgacgtactgggacaagaaactcagagaacagataacatgttccatgagccaactctgtcctcgcttcagattcactcttttctcagccaacagtccttgttccactctatggaagatgccaactcatcagtttgtcatgattaggccagatgccctcaccaagggtcccaaggaataccaaacggtcattccttaggccctttggttagggagacaatcactaagttcagaaaccttaggctgtagtgcatgaaaaaaacacctgaccaacaaaaggagtgaagaaaggtattaaaaacaaagagttgcgctgagatggcttttgtgcttctagtctatgtcaatcaattaatttcctctggccacgctcccctcctcttcaagactatatggagaggggtccttctgtctttattacagttagtgacaacatgacaaaacctactgaattcagcttcaaaattgaaatataaataaatattagggttccccaaggaaggaagttgcttttcctttcccaagcaagaagtggaggagatggggagaagatggttctggggaacatcaaaacagctgcagctccttaggcaaggggaaatactagttagggacagcctcgcatcaaggaaagagatactaagaaactggtcttataaaggaccaaagcaactggaaagaaagtacatcactttatacccagtggaaaacactggaggttcatggtgacccaggtggattgatttattattcaaaaggtaatagctgtctaggatttgtgcctgtgtccacctcttcttcctctgtggtttcttcgtgagcaagggctttaaaatagcatgtgagagtcagaaaagaagatgccagaatgtcaaataactcccaagtaccatgctgaacatttttggtgttctgggttttcttgagttgtttctttcaggagttacaagagtggaacaaatgggcagccactgagaggctcagccttgctcactcactactttctgagcaaggcaattctcttacttctcagaaccccctctctgataaaaatcaataataaagtgtataccctgtccaagcagaaacttttatttcccaggggctcaaagcatttcccaatcaccaatcctctaatccacaattccaatcagcatttagccaataggctaaatttatcttctaaatatcaacatctatgttcaaatcaagaatggatccaatcagcaggtagaggaattagaacatgcaagtcagtgtcctaccaatataatccagagccatcatgtcagtgctgctaaaaatggtattagctaattaggtgaccaccattaatgcaagtcatgatgcaacgtaactgaaggtgttgttgccctaatgacccaagtcacagtttatggccataccactctcaacaagtctgatctcctctaatgaaccatgccatttatctgaacgtgaactcggagatatttaattatatttttatgccctgtaaaataggcaggacccagaaggctgatattgttttctgtttctcacataatagtaataacctttgttttttgtgagtaaactagttgctccaaagagaaactcacccacaacaattagttccctgagatcttttcacaaagtccaggacccagtagatccatccagtggcgtttacagcctgaaactaccattttcctcacaatggcatggtccagctcattgacaataacaaattgctaactgtagaaaaatttttctggaattttatagaattcaaaggaaacaactgcattttttcagaaatttaccacaactgaaacaaggccaagtttataaaaattcctcaactgtaatctcctccacaaaatcccaatgctggaaagaaccttgaagtcatctagttcacacatatccttcagaaaagaaaagatcaaaaggacttgaaattaaaaaaaaatttaaaaaaccactctggattcctgtcctatttcagccactaattcatttgacccagaacgcattacatcatctccctcaaattcactgtcttcatatgtatgatgatagctttaaaccagatcatgtctaaagttccatccaacttgaaaatccatgattatatgaaaccagactacaagtggcccttgaataacatgggtttgaactgtgtgcatccacttataagcagatttttttaaataaatatactggaaaaatttttgcagatttgtgacaatttcaaaaaactcacagacaaaaagcagagcttagaaatatcaaaaagattaagaaaaaaggtacgtcacaaatgcacaaaatatatgtagatattagtttatcacttactaccataaaatatatacgaatttattataaaatgttaaaacttaccaaaacttaggtacacaaacactctacatggcaccattcacataaatataaagatgtagtattaaatcataactgcataaagctaaccatgctacacactgtactactgtaataatttcatagccacctcctgttgctgttgagatgagctcaagtgttgcaagtatccacttaaaaccctgtgtgacactaatcatctttgcgtgaacagttcatctctccagtatactgcgttaccacagtaaaaagtgatctctcaaagttctaggtatctttcattgtgtttagtgcaatattgtaaaccttgaataataccatgggatccatatgtagtgccactagccatgctggaaatgctcccaagaacagagaaaagtcataacattacaagaaaagtcataacattacaagaaaacgttgaactgcttgatatattactgtagaatgaggtctgccgctgcacttgcccaccatctcagacagacaattcgtcttgtaaacagatgatgtaaacttactactgtgattactacagtacagtaccgtaactgtattttatcttccttatgattttctttctttctttttttttgagacggagtcttgctctgttgccaggctgcagtgcagtggcgcgatctcggctcactgcaacctccgcttcccgggttcaagcaatactccggcatcagcctcccaagtagctgggactacaggcaagcaccaccacgcccagttaatttttgtgcttttagtagagacggggtttcaccatgttggccagaatggtctagatctcttgacctcgtgattcgcccgcctcggcctcccaaagtgctgggattacaggcgtgagccaccgtgcccggcccttatgattttcttaataacattttctattctgtagcttactttattgtaagaatacagtatataatacctatacaaaatatatgttaatcgactgtttatgttattagcaaggcttctggtcaacagtaggctatcagtagttaatttctgaaggagtcaaaagttatacgtggattttcaactgcgtggggggtcagcaccaaaatcttaagttgttcaggggtcaactaactgtactttgaaaactgaataggaagaaagagcctacatttttccttacagagaaatgccaagacttttgttaactttcaaactggaggaatgctaactgtcatagctgagatctgggaaaattttaacttatgccaaagtcaagcttctacataattatttttaaagtgaggataatttttctacttgagacaacctagcacagtgacagaataagaagatagaaaatgtgtcactatttactcttgctgaatgtaaatccataacttaactgaagagtaggtgaaatgcattaccttcccagggaagaactcaaatctctttcctgagaatcattccctttctgcaagaattctatgaaagaattatatacaatagaataaaagcttattatttatttactaaatcaaagttgcctggatcattattacacatttatcagaaaaagtcataaattttctgcttagagattttacacttagccgggcgcggtggctcacgcctgtaatcccagcactttcggaggctgaggtgggcagatcacaaggtcaggagttccagaccagcctggccaatatggtgaaaccccatctctactataaatataaaaattagccgggcatggtggcgcgtgcctgtagtcccagctactcaggaggctgaggcaggagaattgcttgaacccaggaggcggaggttgcagtaagccgagatcgcgccactgtactctagccggggcaacagagtgagacgctgtctcaaaaaaaaaaaaaaaagagattttacactttataatagaattaaaatactcagaattggaataactctaaaaatgaatacaagtaatttaaaggaaaatatgtactggatttagtcaataaagtagtataaaaatatacaagctacaggtaggtgctgtagtttaaaattaagcatcttggtatttgttaattgtgtccttggaaggcatcttttatatcagcctgactaaaatgatctaccaccctttgctctctctttaaacaaatacagtgagtttacttcctcacactttgatacaaatttctctattccggtgaatatggatgtctattttttctttcttggtaagcagaaagaagtctgaatcacaattcaaaatgcaattttagtttaagtcgaaaatggggggactactaattatatgggcaatagtattatgatgtgctaagaatgccatcaaaacttctgtctgcatatatattatatatgcatatatttgtgcattaattatataatagaaataacatatactgtgtgttatctattatctattttctatcatctccactttaacttaagacataagtacagattaattaataacccttagcaaattaattaaaatgggaattcttttcacgaagtcacatatatctaaagttgtaaggaccaacatacatgttggtttcagtgttaatcttttcctttaaagatcaagtatgattaccgtttggaaattaattttaggcagctatttgactaatatcatagctgactcagctaagaaagaaaagagcaagaattgagaagcctcattcaatattgactgcaaactgtggcaatgctagagttcctaacaaaaatcatctatgtaaagtttggttacacaaactggctaacaagctggtagggacagcttaaatttgcagtatgtgtacactagtttatcataacctcaattgaataatgtacactctctaaccccccccaaaaattactgagtatcttagctttgggctttaactatttggactagcaagttttgttttgttttgatttgtttttagtagctattcccaaaatgtaaatcagttagtcagataatatatgatgaatatatttaataattgatacactcaacaagaatgaaagtattcatggatatgaaaaaatacctccccttttcaaaaaggtaatttatgtattaagaaaaaaacttcagtgctcactttggcagcaaatatactaaaattggaatgatatagagaagatgtacatggtccctgtgcaaggatgacatgcagatttgcgaagcgttctatatttttttatctacgcagcaaaccaccatggcacacgtttacctatgtaacaaacctgcacatcctgtacatgtacctcggaacttaaaagatgaaaaaaaaaaaactttagacaacagatgggctttaagagataaaatggaaatgtggaaagcttccagtttgttaggcagctagcagcacctaataagcgtctcctagtttctttttttttttaatttttattatactttaagttttagggtacatgtgcacaatgtgcaggttagttacatatgtatacatgtgccatgctgctgtgctgcacccattaactcgtcatttagcattaggtatatctcctaaagctatccctcccccctccccccaccccacaacagtccccagagtgtgatgttccccttcctgtgttcatgtgttctcattgttcaattcccacctatgagtgagaatatgcagtgtttggttttttgttcttgtgatagtttactgagaatgatgatttccaatttcatctatgtccctacaaaggacatgaactcatcattttttatggctgcatagtattccatggtgtatatgtgccacattttcttaatccagtctatcattgttggacatttgggttggttccaagtctttgctattgtgaatagagccgcaataaacatgcgcgtgcatgtgtctttataacagcatgatttatagtcctttgggtatatacccagtaatgggatggctgggtcaaatggtatttctagttctaggtccctgaggaatcgccacactgacttccacaagggttgaactagtttacagtcccaccaacagtgtaaaagcattcctatttctccacatcctctccggcacctgttgtttcctgagtttttaatgattgccattctaactggtgtgagatggtatctcattgtggttttgatttgcatttgtctgatggccggtgatggtgagcattttttcatgtgttttttggctgcataaatgtcttcttttgagaagtgtcttttcatgtccttcgcccactttttgatggggttgtttgtttttttcttgtaaatttgtttgagttcactgtagattctggatattagccctttgtcagatgagtaggttgtgaaaattttctcccattttgtgggttgcctgttcactctgatggtagtttcttttgctgtgcagaagctcttgagtttaattagatcccatttgtcaattttggcttttgttgccattgtttttggtgttttagacatgaagtccttgcccatgcctatgtcctgaatggtaatgcctaggttttcttctagggtttttatggttttaggtcttaacgtttaagtctttaatccatcttgaattaatttttgtataaggtgtaaggaagggatccagtttcagctttctacatatggctagccagttttcccagcaccatttattaaataggaaatcctttccccattgcttgtttttctcaggtttgtcaaagatcagatagttgtagatatgcggcattatttctgagggctctgttctgttccattgatctatatctctgttttggtgccagtaccatgctgttttggttactgtagccttgtagtatagtttgaagtcaggtagcgtgatgcctccagctttgttcttttggcttaagattgacttggcaatgcgggctcttttttggtgccatatgatctttaaagtagttttttcctagtttcttataaaaataactttgacaccaggtgcggtggctgacgcctgtaatcccagcaccttgggaggctgaggcaggtggatcacctgaggtcaggagtttgagaccagcctggccaacatggtgaaaccccatctctactaaaaatacaaaaattagccaggcgtggtggtgtgcgcctatagtcccagctactcaggaggctgaggcaggagaatcgcttgaacccaggaggcggagattgcagtgagctgagatcatgccactgcactccagcctgggcgacagagtgagactccatctcaaaaaaataaaaaataaaaaaaaataactttgaagacaattctccttgaaggaagacatcttatggaaatacacgattgctcaaagataaatgtgtaaagacattcactggagctttgtttgaaaaggaaatcagaaattccctaaatgttcatcaaaaaacaaatgtttaaataaactatgagataccaatgcaataggttaatttgcagcctttataaatactgaaatatgtatacattgatatgaaaagtactccctgcataaaaataagattttcaaaatgtttggacagtatctgtagaataagcccctttaaaaataacaatcataaaacatgtatacattatgataaaggcaaagaagttcgaataaatatttgcaaaatatttgatcatcttttgggagacatgattatagcgtatttcacttcactttttgcttattcattattttgacatctttatgagatataatttccacaccatgaaattcatccatttaaagtatacaaattcaatgattttcagtatatattacaaagttgagcaagcatgtctacactctaattttagaacatttttgctacccctaaaagaaaaagaaaccacataggcattagtagtcactctccactccctctctagcaactatctgggcagccactaacatactttctgtctctatggatttgtctattctggatatttcatataaatggtattgcacaatatgtgaatttttgtgtctgacttttttgcttcacataatgttttaaagtttcatccatgttgtagcatgtgtcagcattttattcctttttatagctgagtaatgttccattgtatggatatatattttgtttatccatttgttagttgatggacatttgggttgtttccactttttggctattaaaaataatattgctataaacactggggtgtgtttttgtgtggatgtatgtttcatttctcttgcgtagatgcctaggagtggaattgctgggttatacgctaactctatgtttaactttttgagaaattattaaactgttttccatagcagctgcaccattttgcattgccaccagcaatgtatgagggttccaaatcttccatattcttggcaatgcttgttgttgtttatcttttttattatagctacccttgtggatatgaattggtatctcattccactattgatttttatttctctgatggctaatgatatttataatcttttcatgtgtttactggccatttgtatatctttggagaaatagttattcaaattctttgcccatttttaattaggttgtctttttatatgagctctttatatggtctggagacatattccctattagatacataatttgcagatattttctcttattctgtgggttctttttactttcttgatgatgtcctttgcagtgcaacacttttttattttgattaaatgcaacttagctttcattttctttcactgcatttggtgtcacagctaagaaatcattgcttaatccaaagtcatgaatatttataccaatgttttcttctaaaagttttatagttttactcatacatttaggtccttgatccattttgagttgtttgtggcatgaagtgggtccaacttcttccttttatgtgtggatatctagttattctaacaccatttattggaaagactattctttcccctttaaatggtcttgaaacccttgctgaaaaatcagttaatcacaaatctaaaagtttacttctggattctcaattttatcccattgatctatatttccagcctcacaccaatactacactgtcttgattattgtagctttatagtaagttttgaaatcagaaagtatgtgtcctagattgttttggctatttggattccctcatttccatatgaattttgggatcagcttgtcaattttggcaaaagaaagtcagctaaaatttctataaaattgtattgaatctgtagataactttggcaagtattgctattttgacaatattgtcttccactccatgaacatgggatacttttccatttaataaggtgttccttaattttttccaaccatgttttatagttttcagaataaaagtttttcactttttgttaaatttattcctaaatattcaattaattttgagcaactgtgtatttccataagatgtacatatatattatactgtttttataatttcattttttgattctttattgctaggatatagaaatataattgagctttatagattaatgtggtatcttgcaattctgctggactcaggtatgagatcaaatgggttcggggaggttctttacaattatttatgtactagattatgtcatctgaaatagaaatagcttttactttctcctttccaatctagatacattttatttctttttcttgcctaattgtcctgactagaatctccattacaacattgaatagaagtggtaaaggtggacatttttgtgttgccattgattttagggttcttgctgttttatccaatctgacaatgtctgccttctaattgaggtatttaaaaaattcacatttaatgaaatttttatgtggttgggtttagacacatatataaacattttctataaacatacatttatatgtatatacacacacatatattttcatatggttgtgtttaaacatgggacagctgtgagttttcttttttatttctaatctttgctcccctttttctctttttctgctttctttggaaggaatttttttttccattttgtatcttttttcctaattagccaaaataagggttatgtattatttaatttaatgattggtttcaaagttaaaaatacatatttttattatttctgtctgccttcaagtgatattacaccacttcacatacagtgtaagaatctcacaagcctatactttcattacttatttccctgtctttatgctcttgtcatacattttaattctacaaatattatgagtctataatacattgttattatttttgctttaaacaatccaattatctattaaagagatttaaatatttaataataagacatatttttttttctcttcttatgtattttccctttctggtgcacttctttgttttgtttagatcaggatttccatctaatactacttttcttttgcttgaaggacttcctttaatattccttattgtgccggtctgatagtgataaattctttcagtttttacaggtatttttgaaagatagttttgctgggtaaagaattataagttgcctttttttttcttttagtacataaactagtgctctactgccactagttttcgttgtttgtggcaagaaatctgctcttacccttctcttttttcttcattacataatgcgtcttgtttttctgattacttttaagatttttttctctatatcactagtttaaggcaatttgattataatgttcattggagtagttttcttaagattttcctgcttggggtttatttagcttcctagacgtgcagtttacaattttcaccaaatttgggaaaaaaaattaaccattatttcttaaattttttttctgcccttcccttcccttcagagtctttaattaaatgtatgctaggctgcttgaagttgccccactactcactgatactctgttcagtctttcatcttttttctttgtatgtttcattttggatagtttctattatgatatcttcaatttcattaatcttttcttcagcaatttctaatatgcattaatcccataccatgtattctttatccaagaaattgtaggtttcatccctagagattcaattttggtcttttttttaatgtctttcaagtatctatttaacttgtttaatctttcattcagattcttgaacatacagaatatagttgtaataactattttaatgccctagtctactaattttattatctttgtcaatcttggttgattgagttttctccttattatatatcatattttcctgcttttttacatacccgctaattttttattgcatgctacacatggtgaattttagcttctaggatgatatatattattacttttttttttttttttttgagataagagtttcgctcttgttgcccaggctggagtgcaatggcacgatctcagcttaccgtaacctccgcctcccaggttcaagcgattctcctgccgcagcttcccaagtagctaggattataggcatgtgccaccacgcccagctaattttgtatttttagtagggatgggatttctccatgttggtcaggctagtctcaaactcccatcctcaggtgatctgcctgcctcaacctcccaaagtgctgggattacaggtgtgagccacagcgccctgccctattgttgcatttctataaatattttgggctccaatcttcgatgcagttaaattacttggaaacagtttactcctttcaagttgtgcttttaagctttcctagatgagaccagagaagcatttaatctagggctacttttgcacttctaccaaagcaacacccatctttatactctatcttgtgtcctgtgaattatgagacatttcactctgactggtgggacagtcgctattccagtgccttttgtgagctctgagagttagtcactataatactataatccttttgtgtgatttttcccctggccttgagtgatttcctcataggcatgcattgatcagtactcagctgaatactgagctgagggaacataccttctcagatctctagagcttgtgtatcttctctctctctctctcctctgcccccaacccctctagctctcttctctctagtactttgccctgtaaactgtactctctttggcctccttagatttccagctctgctcccccaatgtaaggagaccactaggctctgcctgaattccttctctttacaacacagcctggaaactttctctaagtagtaatctggaacaactgtagagctaacttcacttatctcccttttctcagggatcaaggtattttgttgcctgactttaaatatcttaataaccattgttttatacattttgtccagatttcaactgtttcaggcaagatgataaatcaggtacctgttacttcatctcagccagaagaagaattgactgtaaattttaaaatttcttctccctggaaattatctgtgttcaagttttctattactgcataacaaaccatttcaaaaattattggtttaatataacaatagtatttattttgctcatgaactgtagctttggtaagaccctgtgaggacagcttgtctttgctccacctggcattagctaggtggctcaaaaactggggatggaattctcattcattcacatatctggtcattggtactggctaatgctaaaatctcagctggaactgtgattagaataccttatgccatcttttcatgtggacacttgacttcttaatagcataatggctgggtttccaagggtaaatggagaaaaatgagagagagacagagagagagaaaacatcacgtaagagctacatcactttttctaaccttgcctaaaaagatcacacagcccagcatcatcacaatatattctttagaagcaagtttctaagactagcccatattcaaagatagaggaattagactctcccctttgatgtgagaaatgccgaataatttgtggacacattttttaaaacctcacatttgttctccacgttgcctgtttctgcttattttgatttctatagatactttcctgttatctgatgtttctgggttgaaggttcatatttatttaaaataggggcactaataccctctaagagtgggggaggtttgtctattctgagctttattgtgatctggttgagatatttaaatggcaaattttcagcatctctttagatatttcctgttgaaccagtcatattcccttgggaaaaatccccaacctcttctttggaggatgaagaccaatattctgggacctgaatgtaggaagagggctggctcagaatccaggatgcaaatattatccacatcttcattttctgttcagtacctccaacctcaactgaacctgaagttccctttgtttcccttttttaaacaatattcttttcctagggtcaaaaaatggctggtccctgggtggtttatcagactgtggggagcaatatgggatctggatagttcttagactttcaaacaatcctccttacttaatctctattttcagtcccacttccagaagaatctagcactgcccattccttcaccttacacaaattcttctgtataaatcagatgaacttctgctttcctcactgctggcttaggattcgcttttcccatttgcgttcccacttccaacattttattttctggtcttcttctccaatcttctctttcttgtgaatcttttaaaaaaattcctttattgccatttgatggtatttggggaaggagcaaataaaaacatatgcttaattcactatattttgtcggaagccaagctcactcctttaagctctacttttaggttactcaatacaaagattttccaggttcaactatcttcttttcaacaccttaattagtgctccagcattcatgtagcaaatctcctaaaatctccttgatatctgtgaaagttcctgagtgactgctattttcatgcctttcctggactatttggtctagtttgttaaaaagctacttctaagtagattatgtgcattaaaatctgcaccaaatcacttttcaatgtctctctagctattaatggtttggggattctctttaaagtttcatttcaggctgggcacggtggctcatgcctgtaatcccagcactttgggaggccaaggtgggcagatcacgaggtcaggagatcgacaccatcctggctaacatgttgaaaccccatctctactgaaaatacaaaaaattagccgggtgtggtggtgctcgcctgtagtagcagctactcgggaggctgaggcaggagaatggcgtgaacctgggaggcggagcttgcagtgacccgagatcgtgccactgcactccagcctgggcaacagagtgagattcagtctcagaaaaaaaaaaaaaaaaagtttcatttcacatttttattcctattcctgtctctctgtggatcatgttttccagtatcactgctttctaagaacaaacagtgatggcatttacatacttaggacataatttattttgtcttcagataaagaaaggtgaaataaaattcaaaattcaatggtgattaagacatttctctagaataatatatttttcccctgaagtcctcaagacagtcggttgtaactaactaataaccatctacaaaaaacacagagtcctagaacagttaagaactggtcaaatgtcatgcaatcagaccattttagaactaggtttgtttatttttgaactttcatattgacttagatacgcttgggaccatttttaagggaatagcactactaagcatgtatctggctgagcagggaaaataaaataatgaattctcatgtacccatcacccaaattaagcaattttcaattcttggcctgtcttgcctcatccatgcgccatttgtttcttctattttgttactttgaagcaaatctctgacataaaatcacttcaaaagtgataaactttcaaggtgaaaaatcaatcaatagtttagattaagtagtatcaagtacatataacacattttaactaggaaaaatatgttcctaattagaagtgaaaattcaaatattttttcaaatttttaactttttctttctcctcaggaatgcctgtaactcataggtttcgttgctttacacaatgccatatttcttaaaggctttattcagttttttaaattattttttctttatttgttttctggctgggttaatttgaaggactggtcttcaagctctgaaattctttcttttgcttgatctagtctattattaaagctttcaactgtattttgaaattccttcagtgaatttttcatttccagaagttgtttttttaaaaaagatctctctctcttctttcatatcctgaattatttatctgatttctttgtgttgtttttttaactttctcttggattgaattgagcttccttacaatccatattttgaattctttatctgtcacttcagaatttttattttggttaggatccattgctaaagacctagtgtgatcctttggtggtggtttcacagcagtcagttttttcatgatcttgcttgagatgtagacatccagatacaagaagtgcagagaacacctgggagatactttacaagaagaacatcaccaaggtacatagtcatcagactatctaaggtcaagttgaaagaaaaaattttaaaagcacctagagagaagtgtcaaactacctataaagaaaaccccatcagactaacagtggacttctcataagaaaccttataaacagaagaaattgggagcctattttcagccttctttaagaaaaaaaaatgccagccaagaatgttctatcctgcctaaataagcttcataagtggaagaaaaataacgtctttccaggcaagcaaacattaagggaattcatcacaactagactggtcctacaagaaatgctcaaaggcattctaaacatggaaaaaaaagggcaatatgcaccaacataaaagcaaacttaagtacaaagctcacagatcctattaagcaattacacaattgagattacaaagcaactagctatcaacattatgactggaggaaaacttatcaatattaacttgaaagtaaatggcctaaatgctccacttaaaagatatagactggcaaaatggatttaaaaaacaagacccaacaattagtcgcctacaagagtatcatctaataggtaaagatgcccacagactcaaagtaaaggtggtttcagtttgtgatcacacaaactgaaaacaaaaacaagcaggagttttgacataagtatcagatacttatatcagataaaatagactttaaatcaacaacggtggaaaaaaacaaagaaggtcattatatgatgataaagggttcaattcagcaaaaccatttaactaccctaaatgtatatgcacccaatatcggagcagccagattcataaaacaaatactattagacctaagaaaatagatagatagcaacacaataatagtaagggacttcaacaccccatcaacagtatgagacagatcataaaggcagaaattcaacaaagaaactctgggagtttcttccagtaggagatagcttaaaaagtaaaaatttagaaaaaagaaacagggtataaactggactctggagcaaataggcctcatagacatttactgaacactctacccaacaaatgtagaatatgcatttttcttattcacacatgaaacattctccaaataaaccatgtgcttggccataaagcaagtctcaatacattcaaaaaaattaaaattatatcaaatatcttctcagaccacagtgaaataaaattaaaaatcaacaccaaggggaaatctcaaaattatgtaaatacatggaaactaaataacttgctcctgaacaatctttgagtaaataataaaattaagagagaaatcaataaattttttgaactggataaaaatagggacacaacatatcaaaacatttgggatacaacaaaagtagtgctcagaggaaagcttatagtgttaaatgcctacaaaaagatagaaagatcacaaattaacaacctaatatcccacttcatagagctagaaaaacaagaacaaaccaaactcaaagctagcagaaaaaaataaataacaaagatcagagcagaactaaatgagattgagaccaaatagatataaaagatcaatgaaacaaaaatatttttcttcaaaaggataagctaaattgatagattgctacctaggagtcaccaagaaaaaaagagaaatgatccaaaaaacacaatcagaaatgataaaggtgatactagaatataatcacagaaataataaagatcatcagagagtactatgagcacctctgtgcacaaactagaaaacctagaggaaatggataaattcctggaaacatgcaactcccaaaattgatccaggaataaatagaaattgtgaacaaaccaataataagtcataaaattaaatcagtaatttaaaatacactcccaaaaaagtccaagaccagacaaattcacagctgaattttaccaggtgtacaaactaatatcaatcttacagaaactatttcaaaaaatgaaggaggagggattctttcccatctcgttctataaaactggtatcaccctgacaccaaaatcaagcaaggacacacaaaaaagaaaattacaggccaatattcctgatgaacacacacaaaagtcctcaacaaaatactagcaaactacaacccttcatgctaaaaactctcaataaattaggtattaatgggacgtatctcaaaataataagagctatctatgacaaacccacagccaacatcatactgaatgggaaaaaactggaagcattccctttgaaaactggcaacaagacagggatgctctctctcaccactcctattcaacatagcgttggaagttctggccagggcaattaggcaggagaaggaaataaagggtattcaattaggaaaagaggaagtcaaattgtccctgtttgcagatgacatgattgtatatttagaaaaccgcattgtctcagcccaaaatctccttaagctgataaacaacttcagcaaagtctcaggatacaaaatcaatgtgcaaaaatcacaagcattcctatacaccaataacagacagagagccaaatcatgagtgaactcccattcacaattgcttcaaagagaataaaatacctaggaatccaacttacaagggacgtgaaggacctcttcaaggagaactacaaaccactgctcaatgaaataaaagaggatacaaacaaatggaagaacattccatgctcatgggtaggaagaatcaatatcgtgaaaacggccatactgcccaaggtaatttatagattcaatgccatccccatcaagctaccgatgattttcttcacagaattggagaaaactactttaaaattcatatggaactaaaaaagagcccgcatcgccaagtcaatcttaagccaaaagaacaaagctggaggcatcatgctacctgacttcaaactatactacaaggctacagtaaccaaaacagcatggtactggtaccaaaacagagatatagatcaatggaacagaacagagccctcagaaataacgccgcatatctacaactatctgatctttgacaaacctgaggaaaacaagcaatggggaaaggatttcctatttaataaatggtgctgggaaaactggctagccatgtgtagaaagctgaaactggatcccttccttacaccttatacaaaaattaattcaagatggattaaagacttaaacgttagacctaaaaccataaaaaccctagaagaaaacctaggcattaccattcaggacataggtatgggcaaggacttcatgtctaaaacaccaaaagcaatggcaacaaaagccaaaattgacaaatgggatctaattaaactcaagagcttctgcacagcaaaagaaactaccatcagagagaacaggcaacctacaacatgggagaaaattttcacaacctactcatctgacaaagggctaatatccagaatctacagtgaactcaaacaaatttacaagaaaaaaacaaacaaccccaccaaaaagtgggcgaaggacatgaacagacacttctcaaaagaagacatttatgcagccaaaaaacacatgaaaaaatgctcaccatcaccggccatcagacaaatgcaaatcaaaaccacaatgagataccatctcacaccagttagaatggcaatcattaaaaagttaggaaacaataggtgctggagaggatgtggagaaataggaacgcttttacactgttggtgggactgtaaactagttcaacccttgtggaagtcagtgtggctactcctcagggatctagaactagaaataccatttgacccagccatcccattactgggtatatacccaaaggactataaatcatgctgctataaagacacatgcacacgtatgtttattgcggctctattcacaatagcaaagacttggaaccaacccaaatgtccaacaatgatagactggattaagaaaatgtggcacatatacaccatggaatactatgcagccataaaaaatgatgagttcatgtcctttgtagggacatagatgaaattggaaatcatcattctcagtaaactatcacaagaacaaaaaaccaaacaccgcatattctcactcataggtgggaattgaacaatgagaaaacatggacacaggaaggggaacatcacactctggggactgttgtagggtagagggaggagggagggatcgcattaggagatatacctaatgctaaatgacgagttaatgggtgcagcacaccagcatggcacatgtatacatatgtatctgacctgcacattgtgcatatgtaccctaaaacttaaagtataataataataaaataaaaataaaaataaataaataaataaatactagcaaactgaatccaacagcatatcaaaaagataatatgatgtgctgtggattttattcccacatgatcaagtgggttttattccagggatgcaaggatggttcaacataaggaaatcaataaatgtgattcaccacaaaaacagaattaaaaacaaaaaccaaatgattatttcaatagatatagaaaagcatttgataatccaacatcttttcatgactaacaccttcatcaaactggcatcaaaagaatataattcaaaataataagagccatataaggcaaacctacagctaagatcatactgaatggggaaagttgaaagcattccttctaagaaccagaaatagacaaggatgcccactctcaccactcctagttaacatagtactggaaatcctagccagagctatcaggcaagagaaataaataaaatgcatctaaattggaaaagaggaagttaaattatctctgttcactcatgacattatcttacacccagaaaaccctaaagactctcaaaaagattcctaggcttgagaaatgagtttggtaaggtttcagggttcaaaatgaatatgcaaacatctgtaacatttctatacatgaataatgttcaagctgaaagacaaattaagaactcaatcccatttacaatagccacacacacacacacacacaaatacctaggagtacatctaaccaaggaggtgaaagatctctacaagaactacaaaacactgatgagagaaatgatggataacacaaacaaatagaaaaatatcccaagctcatggattggaagaatcagtatcattaaaatgaccatactgcccaaagcaatgtacagattcagtgcaatttctatcaaattaccaacatcatttttttgcagaattagaaaaaaatcctaaaatttatatgaaaccaaaaaagagcctgaacaaccaaagtgatcctaagcagaaagaacaaagttgggggcatcacattacctggcttcaaactatactacaaagcaacagtacccaaaacagcatggtaatggtaaaataacagacacatagaccaatgggacagaatggagaatccagaaataaagccacatgtgtacatccaactgatcttcaacaaagtggaccctcaaaaaatggggaaaggacaccctgttcaataaatcatgttgggaaaattgggtagccatacgcagaagaatgaaactagatccctgtttcccaccataattaattcaagattaattaaagacttaaaactattttttttttaaaaacctgaaactataaaaatcctaaaagaaaacctagagaaaactgttctggacattggcctaggcaaagaattaatgaccaagacctcgaaagcaaatacaacaaaaacaaaagtagacaaatgagattttttttttaactcttgttttaagttcaggggtacatgtgcaggtttgttacctaggtaaactagtgtcatgtgggtttgttgtacagattattttatcaccccggtattaagcctagtactcattaattattttttttgatcccctccttcctcccaccctccaccctctaacaggccccagtgcatgttgttcccctttatgtgtccacgtcttctcatcatttaggtcccacttgttagtaagaacatatagtatttggttttatgttcctgcattagttagcttaggataatgacctctagctccattcatgttgctgcaaaggacaagatcttgttcttttttatggctgtgtagtattccatggtgtatatgtaccacattttctttatccaatctgttattggtgaacatttaggctgattctatgtctttgctattgtgaatagtgctgcaatgaacatacacaccatgtgtctttataatagtatgacttaaattcctttgggtatatacccagtaatgggattgccgggtcaaatggtatttctgtctttcggtctttgaagaatcaccacattatctttcacaatggttgaactaatttctacagcctcaccagcatctgttttttttttttttttttgactttttattaatggccattctgactggtatgagatggtatctcattgcggttttgatttgcatttttctaatgatcagtgatgttgagctctttttcatataattgttggtcaaatgtatgtcgtcttttgaaaagtatctgttcaagtcctttgcccactttttaatggtttttttttttgttttttcttttaaattaagttccttcttgatatggtttttggctctgtgtcctcacgcaaatctcatgttgaattgtaatccccagtactgggggagggacctggtaggaggtgattggatcatgggggcagatttcctccttgctgttctcatgatagtgagtgagttctcaggagatctgattgtttaaacgtatgcagtacttcccctttcaccctttctcctgccaccatgtgaagatgtgcttgcttacccttcacccttccaccatgattgcaagtttcctgaggcctccccagctgtgcctcctgtacagcttgtgaaagtgtgagtcaattaaaccccttttcttcataaattacccagtctcaggtaggtctttatagcaatgtgagaataggctaatacacttgtagatgctgaatattagacctttgtcagatgtatagttggcaaaaattttctcccattctgtaggttgtttgtttactctattgatagtttcttccgctgtacaggatctctttagtttaattagatcccatttgtcaattttgcttttgttgcaattgcttttggtgtcttcgtcatgaaatctttgccagggcctatgtcctgaatggtactgcctaggttttcttccagggtttttatagctttgggttttatatttatgtgtttaatccatcttgagttgatttttgtacatggtataaggaagaggtccagtttcagtcttctgcatatgactagccagttatccaagcaccatttattgaataggcaatcctttccccattgcttgtttttgtcaggtttgtcaaagatcagatagttgtagatgtgaggacttatttctgggttctgtattctgttccattggtctatgtgtttgtttttgtaccagtaccatgctgttttgatttctgtagccctgtagtatagtttagagtcatgtagtgtgatgcctccagctgacaaataatatatataatataatatataatatataatatgatatataatatatattacatataatatatatatgatatataatatatattatatataatatataacatatatatgatatataatatatattatataatatataatatgatatataatatatattatataatatataatatgatatataatatatattatataatatataataaatatacaatatattatatattatattataaatatattatatctataatatctataatatatattatatacataccatggaatactatgcagcataaaaaaagaatgaaatcatgtcttttgcagcaacatgaaaggagctggaagtaattattctaagtgaaacaattcagaagcagaaaataaaatagcacatgttcttacttataagtgggaactaaacaatgagtacatatggacaaaaagatagaaataatagacagtggggactccaaaataggagagggtagaaggaggtgagggttgaaaaattacctattgggtacaatgttcactatttgggtgatgggtatactaggagcccaaaccttgccattatgcaatatatccatgcaacaaaccaacacatgtaccccctgaatccataattttaaaaaaaatgaaaaacaaaaatgtaaaaagttttaaaaagatagaagtgagtactatcaagctgaccataatgaagatactagttgatgtttcaatgaaaatgtgtatttactgatctgagtcaagacaggtaaacctcagacacctcagctccaaccccaacaagtatctgaactctgctcttggccttcctcctgccctttggacttggactttgttttgctttccctggttcaacctactctcgacagatgtaggttgcctctgcacttgcctcagcactctggttcttcttgttctatttcaggaaatgtttatctctgtatctccaagcctagctcaatacctaacacaaagtaggaattcagctgatgcttatttaaggaatgagttgccgtgagaatggcaaagaaatctcaatgaagggagagatactggacacctgctccagggctcacctcaccaaagcggcagttttcctttcagtgttcagtgtctacttttctctccaggaaaacactgatccaattgcttctcatcggcaagattattcaagtaatcttagatgtgcaaacaagccacggtggcccttgtgtcaggcagaaccagggccccctgcagttgcccatcatacttcatgtcttatgagatgatccctgagcagcactggagaccccagacagaagatgcctttttgatgctattaagatctttctattagtgtggagggaataaaaggggcagggaagaacacccatccctggggtgtttctttacagagcacccatcgctccaaaagcaggggtcactttgtgaaggtaagatcatatttttacagtgctatcttctgaatgagaggaaatccacacgccagacagcctcctgtcaccagacggcctgtatcagcctcactatgtggactggtgcagttaagccctgaaagatggtgtgcgggggtgtcagacacagcccaggcaggggagggaggaacttcagagcaggcaatcccacctcctgggaaggactggccttgtgaccttagccagtgtcttccagcctcctcaggaccctccttggtaaagcaaagattaaacactgacccatccacccagatcatgtgagtgaaacagcagccccactggaaaggtattggagaatagaactctttatttttttttagaaacatgaacatttccattaatcttctctgcccccaaattgtggtttctggttccttgattcttacaaataaaagagagaaacagttttggagaacaacgtgtcttggccctaagaataattttcttacttgtgcagttgaggacggtttattatgggtctgtttagtgtctcggtcaagggagggaaggaataaaatgttgatccaagaagccatcttgctctgaggagtgatgaagtacatttttgtgtgctgaggcactcttatgggttgaatttctttacagaatgagcccaagtaggcaggtacagtaatagaatggctcactgggagattattagcaacaccagaggcttatctgtccttgtgtctctggggagaagcacaaagagggggaactaatccactccaagaagaagaaagagatggcaccttatccctaatttgatgtatcactcgtagggtaggtaggaaagttcttcagttccatttggcctaggcagtgaattactcctcatatttctattttctagtggtcagtgagctatgagtcatgcagtgactcatagcatcatcatcaatgtatatttgggggtgctctcagggttcctgggttcgtgctgataaggaaagccaggctttgttatgactgagtctttttccgtgctatgtgtttcgtgtgtttttttagccgccacaaccatcctgatggtgtcataccactcagaatgatagaaatgtcttacttttttggaaactagataaacaagaatatcatgcatttgggaaatgtttaaatgtacacccacatgtcaggcccactaagtgtgtatttgaaaaatcattttcatttttatcatgctttgacaaaaggaagtacatcaacgctctgtttaggaaaaatatactgtactctgctactgaacagctatgtggccttgggcacgtctcttaacttcccagggcctcagtttcctcattcactgtctactttcctgattctaccgtaacacttcattaggttgcaaactatgtctagaaggtagcagcacccccatctctcattcaaagggccttctcaggacacaccctcctctaccaaggctgtgctcactgatgacttctccatgagcagctgactgaacttggtttgtaggaagttcatacaatctgctggcaccagcaagaaatggaatgctggaagcttccagcttcactcaagtacatttaaccattcaacagacacttattgaacatgtcctatatgccaagcactgaatgccaaggatccagcaatgtcaaagcagacaatgtccttcttctcatgcagcttaccttgtagtgtgggaagtggaaaataaacaacataaataggtaaattatgcagaaggtgttaacaactatggaaaaatagagcagtttgagggataaggatgctggtgtattggcagagaaagagggttaaggcctggcttcactgtaaaggtggtgtttgactaagacttgcaggtgagagagtgaaccataaggatatcttaggaggactggcccaggtagaagaaagaaccgctgcagagactctggggagacatatggctggcatgctggaggagcatcaaagtggccaatgtggctggagcagagtgaattcagcgcagtgtaggggatgaggcagggggtacaaggggtcaaagcgtgtaaagcctcatagaggctttacaaggcttgactttcactttgaaagaaatgagaagccattgcaggattttgaacaaaggaatagccagatcaggccgggcgcgatggctcacgcctgtaatcccagcactttgggaggccaaggcgggtggatcatgaggtcaggagatcaagaccatcctggctaacacggtgaaaccccatctctactaaaaatacaaaaacttagccaggcgcggtggcgggcacctgtagtcccagctactcgggaggctgaggcaggagaatggcatgaacccgggaagcggatgttgcagtgagccaagatagtgccactgcagtccggcctgggcgaaagagcgagactctgtctcaaaaaaaaaaaaaaaaaaaaaaaaaaaggaatagccagatctgacttacattttataataaagctcaatctgtttattaatggaagaataaaatgaagggaagtggcaaatctgagtcactaaaacaatttaggaagctgttgggataaattatgcttgcatggaccagaatagtagcaggaagatgccagaggtggttggattctaaatataatttgaaggtagaccctttaaaatttccaggtggatcggaggtgagatgtgagaaaaagagaattgtggacagcttcaaggtcaagaacctctttggtagtggatgctctttggggttttaatatgagacataaagatccatatgctctatgatcactcccaagggtccatcccacaactcctttccctatttgctccttattttctattcttattccttccaggcctctgaccaataaaccaagccattcacaccactgctcaggggccttgtagatctgtactatgggccactgctccctgctgggttacactcctgaagtcactctgaacccacccacagtttgctgtggaggccgtagttaaaaagcaaatggccaacggcagctgagacaggtgaaattgggagatatgaaggactcaaaagaggtgtttcagacacaaggtcatttatttctgttactatgttttttatttctagcatttcccttttatgatttcttgagttcccatctctgtttatattacccatcttgcatgttcttgcatgttgtctacctttttttccatcagagctctcagcacattaattatagttattttaaatttttggttggtctgataatcttaaaatctctgccaaatctaagtcaggttctgttgcctgctttgtcttttcaggctatgtttgttttttcttgcccattagcgcacctaaattttgttgaaagttacacatgatatattaggtaatagaacctgaggtaagtcagtctttggtgtgagggtttatgattacctggttaggagctacactttactttttgttgtagctataagcgtctgaggcttcaatttcttctactgtccttgtttttgtctctccagttatctttgggtttccctagaaatgtctttttaaatagagtctgagccttgcagacttttcaactattatcatctgttatgatttaggagtttagttgacacatcaatgagatatgtaactggcgggggacattctataattccataattaggtctcaattttttaatgagcctgtgctcttgggctgtgaacttcataaatgcttcttaatttttttccctctcaggtgagataggaaagttagttagggtgagagttgggtattttccttcccctacattatttagattctagaaatgtaaattcctttgagagcaggcagaggacagaacactccaagcttatttcaaaatgggtactttccctgtcttgctggaagcccagggggatttttctccagtctccactatgagagaacaccttgtggggcttagggaagtaaaactccaaaagtgagaggaatcgccccaccactaagtttttaactctcaaactagtccacactcagcttccagcagttcatcattacagtttaagtttctggctccagcagcttctgctcccactaagctgtgattctctgtattctcctttctctccagtttttaaggcactagtttgctctgtgaccttaattctctgatgaatctaagaagtgttgttgattttcagtttgttccacttttgtcttgttgtaaggatgggagtgatgacttctaagctggttacacattggagtggaaactggaaatttaaatttttaaatgggaatgaacgccttgttcttgggacagaacaatataatggatgttaattcccccttgatttaatctgtacaatcaattccattcaaattctcaattagttcttttcaggaaattgaaaaagttattttaaattcatttaaaaattagaagatgtgacaaaaagccaataaaatataaaaataaaagtgataaggagcctgttctaccaggtatcaaaatgtattacaaagctataataattaaaatatccaggaactatgccaaagtgtatactcaaatgattagaacagaatggctggtgcaaaaatagaccaaagttcatctgagaattcattctatgattaaagcagaatttcatatcagagaggaaaatatggattatattgagacaactggttagatattttggaggaaaaataaagttagatccaccctgataccttgaatcaaaataaattccaaatagttcaaaattgtaaatattaaaattaacagtaaaagtgccaccagcaatgaaactggtgacttcactgcatttctgctcctctccttttccaactccaattcaactgccaactgcatcctctgttttcagtcttattttgttaataattaggatacctaaggctgtaatatttcctctgaatttagcattatctgtataacatagattttggtaggaagtattctcttttatattatgtattagttaatttagaatctcaattttgattacttatttgatccaagggtctatgaaaagggtatctcttaaattttaggcagttaaatttttatcatgtttttgctattaatgtattgtatattatattattattatcagaggctggattttgtaaaaataatattattttcagaagttttaaaggaaatttgaatatagcatcttatacccagccaaattcatattgaagtgggagtgcaaatttaaaaaagatttataggcacactaatagtcaaaaaacatattaagcacattctctgaaagaattacttaattatatactcagtaaaaaaaatttcaaaatatgcaaaaatagaaattaaaaggttgtgagcaaatgataattttataattatcaaaataactattggtacataaaattagtaataatctattactaactatcttggaaaatatctgtattagtcaggattctccagaggaacaaaactaagaggatatacagctgacccttgaacaacacagatttgaactgtgtgggttcatccagttatacatggattttcttccacctctgccactctagagaccacaaaaccagcccctactctttcccctcctcctcagtctactcaatgtaaagatgagaaggatgaagacctttatgatgatacacttccacttaatgaatagaacatgtattttcttttccttatgatcttcttaataaccttttcttttctttagcttactttattgtaagaatacagtatatagtacatataatatacaaaatatgcattaattgacatgtatgtgttcatattaacagtaaggcttctggtcaatcataggctattagtagttaagtttttagggattcaagagttatacatgaatttttgactgccagggagtcagtatccctagccccccattgttcaagggtcagctggttattcaactataatgcatatataaatatttcattataggagttgttcttatacagttatggaggacaaaagttccatgatcagccttctacaagctagagaaccaggaaagacagtggtataattcagcccgtctgaataaccaaaaaccaggggagcccatgatgatgtaagtccagtctgagttcaaagacctgagacccaggattgttgatgtctgagggcaaaagaaaacagatgtcccaaatcaaacaggaagcaaattttcccttcctccagccttttgtcctattcaggtcctcaatgaattggacgatgacagtctactaatccaaatgctaatctcttccagaaataccctcacggaaatgcccagaaataatatatcaccagtaatctgggtatcccttagcccagtcaagcagacacataaaattaatcacaatatcaacatgaaaggaaatagacagatgagaagaaaaagagggaactgaaagcatgctaaatttctgattttgattcagagaagaaggcaggagaacaggctgatattaatacaaaataattcctggtagctagataataagataaatttaaatttctttaaaatttaagtgaaattgctagaagaataagtataggatattcagctcccaaaccactaaaggaaaggaaatataatttaaataaataaataaataattaaaaagcaagaaagagagaagaaatagaaagaggaagaaagagaagagaaaaagaaagggagaggaagatgaaaaatgaggaagatggaatggaagatgaaactataaagtgaggtgtaaggaacaagtccaaataatcattcctcacaagaaatatgggtgtgttaaattcttaattagactgcaggatttctggattttctatttaagattttccatataagaacctcatatttctgaggttcttataaagatgcatcctagtgaagacatgccatgtttttatctccaactaaagaatatcacaacggacttatagctcacatagaaagggaagaatgagtttcccagggaaatgtcaaagaagcagaagtaagcagatttagaaaaccagggatgtagcaagcttacgaatcaacattgattttgctagggcttagattttgcgcaaaacatcagttttaagccttcagagctctctgtgaaattctttcctctgaaaagctctgtcaggggcaaagctgacccagtgtggaaatgccatgagtcagagaccagacagatctattggggtgagtcagaaaatcacggaaggtcccaccatgggcaaaacaaggaagaatgaggcagaaagtaagggcagtgcagctggtaattccagagcccagactcaaagccattataccatgccagggaatctggaagaaggttacaagcaggggttttggcagaagttttgtagtcaagtggtcaaagacaagggaatgcagccaagaagaacagacaaagttacagcaaataaactgaatatggatggggtcaagtagaaggaggggagtgtagtcctatggaaaaccattgagggccaactacaaggaatggagtaaaagacaggatatagtcccagcagcctgacagtacccaagttctttaaagacaagaatagcaaacaggaaatcaaaccaggaattcaggcataaaaagtgagaaaagaaatcatctagaccgacacagcttactgattacattaacatgaccttcctaatccactgttttcatcaaaaatgaccttactattcaaagaaactcttgcctgggaaggtaaacattcaaatgagtacaggatagttctctgggtggccttggaccaacccagttctccctcatttctctcttgtagttcttaggaatagctatagaatgtgctagggatgtaatatcctgagataggaagggactggctggaactgttcatgctctgttccagttccccctagaaacaggatgcccttcaatgctttagcccagggagtcagattctcccaggacataaaacccaaaatagctgcttttctaggtcccacagctgcagtgcaagtggaatacatgcagtcaaggctccatccatccccaggcagcttttctgagccttggggaccagctcaggatgaattctaggcttctgttgtcccttgctgcctatctgtgaataaaaagtccatttcatggaatttgctgtgtggggatgttctatctcatcagactcaaacaagttagtagttggtgaacttgcttcacaattactgtattaagtgaacatcaaattgttcacctctacagtagatagtatcaaatgataattacttcttaagacactttgaatcctctcacattaaaaccctcatctttttgtgtccaccagtcctaaacgatcgtcatgattcttaccaaattctaatcaaatcttcacattgtcagaaccaccttaaaccagattccatatactcagagaatattaaaaaaaaaaatccaactttgccttcccaccatctgagacactactaaaactttgttatggtagtactctcccttaccggactagcgggacatattcagctttatcttatttttaagttgtcttggggatatttttagggatctagcacttgacaatattggagacccatcaaaatccaatctagacattcttaccaccacagcccaagatccatcttaacctatttctccaaaaatttgtactaaacacactgcttgaatgagaagctgaagaaaagctaaaatgtatcctagaaagccctcatagataaaggaatcattatactttatcctggtccttggaacattcctattctcccaatcaaaaataccaataggcaaggagatgaattcatcaggacctcagggccacaaataaaacagacattcaaggcgaccctgcaggagcacatgcaataccattttatgttagcctcctgagactgtaagttatacaactgtagatctgtgttttccattttttggtgtccttttagattaaaatagtcaatgcttgtttgccttctctaagaaaaattaacaatatacctggactgttgttatgccccaggaatgcactgaggcacatactacctttcataaatcctcaatcaggatcacaaggaccttacttttccctgtggttttcttatacaatatgtagatgaacttttggtgtgttcccaaagagggtgaatgctaagactaacttcatctatctaataactgttttagctcagtaaaggcataaagtttccaaatacaaaatgttgccaaagtaacttcattacttaggacgggagttggcaaactatagccactaagcaaatccaacctgctgcctacttttgtaaataaaattttgttggacacagccatactgattcattatttattgtttatggttaccataaagtgcaactgaattgaatagttgcgaaagagactttatgcccctgaaagtctaaggtatttaccatctgctcctttacataacaactaaaagttgttattgcaaggaagaaaatcccttactcttaaccaactacaggccactcaaaactttactgggccagagacaattaagaagattctccagtccttgccccaaatgcaatgggttctcagcttttctatttgccactccactatatgacaaagttctcaaataccaaacctcttccctgggacactgaacatgaatagatcttttgtgaattatcagcactccaacaacctcccactctttctactcatttgtacctgagagatctgaacaagcccttggtagtctaacaagagcctacccgccttgtcaacagccacagcagctacacaagtgaaggcatcttccagcttggtcttaggatctcctttaaatttaatgggccctcatcccctacagtctttgctgttcactggaaatacacaacacttctcagcaggaagacttgtgttgtgtgaatccttattttctccttaatatatttccatttatcatcatagtactttaaaatcctgttacttttcattaattacccaaaacagaagaaactcatgattgtttaatctctgttcacaaactctctatgccctgagtggatttattagaaaatgctttaggaaatccagacttaatcctagttgctgatggatcacatcttaatagtgatactgcaaaatagaaggtaagaatatcaccccttaccaaaagcaaaatctgtccagattgaagaacttactgcatgtgccagagcctatcagttaactagaaatgaaaggataatttccactgataatagagatatacattttggaaggtagtcatatttggtgatgttttgtaaacaagggttcttgaccccaacaggaactccagttcagattggtcagcagaattaaagaatttttgcatgttctaatgtttcttaaggagatataaagacaggagctcaaacaaatgggtatactacagctctttgttccagacagtcagcactcacttagatcctagccctaatgataatccaatagattctattgctagagaaattcaaagaggcttttatagaatgtcagtgatcggctccaggttcagaaaagtcgtactaggagaaatccagatgtaaactgcacgaggataatctccgaggctttaaggatggctgtttagtcccgaagaacttcaaatggaatcttgcaaaaattttacatgaaaatacccaccactgcaaagacaaattagcaaggacaaactggccactaaacttcttggtgagaaaacttcactaaaacttctgagggtatttctggtgcatatattacctgccactagactgattctgacaaaactgttcaggtcagacatggacaagagcccagtgcttagaatccctttgaatagctccaaaagggtttcatatatctgctcttgcagtggatttgtaatgtgtcctacttattatttgcttattcttgggatgagttgagccctttccttgctggagaaacatggctctaataattgcaaatttaaaaacttacttgatattgtattaccaacttagggaattccaaactattgctctagtaacaagaccattcatcttccttggtatattggacagactccaatttggccacccaggatccacatttgttggtctttatgcctctgtgtgatccttgactgcagtcaggacctgtgacttgcttctaactaacacagtatgccaaaggtgatgggctattgctcccgtgcttatgttagttttataaattacttgtcttgctagaagacactctgaagactctttcctggcttcatgaagcactcatttcaggaaagcccctgaggtaaggaactgaggctgcatctaggatctgcaggcaactaatagcagccaagggtggcctccagccaacagctagcaagaagctggagccttcagtcttacaaccacaaggaaatgaattcttccaataaatggtgtgagctaagaaacaggttctcccttaatagagcccttacatgagaatgcaactgggacaacaccttcatttcagccttaagaaaccctgagcataggacaacgcaagccatgcttaggctactgacccatggaaacagcaagaataaatgcaggtgcttttaagtcactaggtttctggtgacttgtgcagcaagaaaacttatacactgtgactattatttaaaagctttgcagagtattctcacttactcagaaactctactatcaatatcagccccaatcatcaagaaaggaagaaagggcagatcgaattttaaaacacaaattagcaaatttttcatagattctcaatctttcatcacctaagatattgccattggctttaatgacagtgagatcaattcctcctgggggttatcaactctccccttatgaatcagtaactggtcagcccatgcatctaggattatcatctctgattctagattccatgctatcacaaaccgacaagccaaatatcccagggaactcatgcagtacccccagtattatgattaataggtatgagcagcctttcctcaacatcatcctaaatagcacttctatgacctgaagcctggagcttttgtaaatgaactttcaaataaatagaacttggaagagaactaggaaagagatgcaatattcttggaggctgaaccactttcactgatgacgcaggtaagacacgctacttcacttttgctttagagctaccaactctctcagtattccaaatttcattgcctggcactgtatcattcttgatgagtagtgctaaaatgctacaatgcaatttttcaatcctatggtgctgtttaggccaaagatagttcataagtgattcccaatgactggtatagaattttcagcataaaagcctcagactgctacctacgaattggacagggttttggtaccttggtaaatagatgcatgttttgaagatagtgagattacctaggatccatttttgcccatcaatttaccctctaggaatggtcgttaggtcacagattttaggaagaaaactcagccatgatttcagaaccaaagccctaactcttaagggggaattttgaattttcttctttcctcatgctccttcactttatatttttctgaaaggctcaaaaaacagggagaatcctggatgccatggttcagagaatgcaaaagagttatacaatgccaccatggccatgggactccttgcctagaaggatcataaaattggacagatggtaaatcagaatagagccactttagacacaatattgactttctgaaaggacacagtactatttaggggaagaatgttgtgcttacatccttccagacctctcataatttttaatattatctaaaatgactagagagcaaataaagaagcataaatttagaccatctggctaattccccattcctggttctgtgtgctcttcggactggggatagaatccattctcttggtttaacttggccacactaggctcctagctgagaaaaggatgatgaattctaatctgcattacagcgtttagaggcgtgatgtccagggtcttaaatgctgttgtataaccactatcagatcaccaggccagggatcttacttgtgatttccatcaaatcatccctcaaaaagaacagaaaacctgataattgtggtggttgaaacatccacctccagactaatcaaatgcccagctcaggctgaacattgactaccagtgggactctagaagcaaaatcatctaaatccccacggatcactggctatattaacataactttactattccccagtagagtagtcctcctttatctgtaggggatatgttccaagatcccagtggatgcctgacaccttggataccaccaaaccctatatatatactatgttttttcctatacatacatacatatgatgaaatttaaattacaaattaggcacagtaagagattaacaacagttaatcttagggccaatgcttagagcccctttgaatagctccaaatggatttcatacatctgttctggcagtggatttgttatgtgtcctacttattgcttgcttattcttgggaggggtggagccctttccttgcaggagaaagatggctctaataattgcaaatttaaaaacttacttgatattgtgttaccgacttagggaatcccaacctattgctctagtaacaagaccattcattttccttggtatactgaggaactccaatttggccacccatgatccacattttctaggtctttacacctttgtgtaatccttgactgcagtcagatcctgactttgccctctccactttaagacactactaagactctgtccaagtcatgctcttttactgcaacaagaataaactcagttttttgtttttggtgttattttgaaaagtcagcatttaacaaaaggcaataaatgggtcagttagaggacctggtgaaatgaggaacagggagagaacttggttttaatatccagaagtcaagcaaacactagaggaaccacccacaaggcaatgtggacccatgaatcaaggagttatcttatttatttgcttttatcaaaatcctaactggtctaagcatctggaatggcactgatcttacatgaaaaggtgaagtatttccagctatagggaatggaggagcagtgacttcagggtcagggaggtatataagtcattaagatgtatgtcgttagagagggacaaggacaatgaaagttcattggaatttgtaaactttattcccaagtacacatttaaatggctggaaccttggattcttgtttagaagctatattgagggtaactaaggatgtcaagtgcccaaaagaacacttacctgtatttcattcacttggtaagttctctcatctctctgagcccaggtttttgccctgtgtaaagtataaatgtaattcctttctctagactcttcactgtaattcacttgcttatatgaatttgcttgctgtctttttatttcttctctcttctctaatttgccacatttccttcactttttgttactgaaacatgtctgcagggaaaccagtcagtaggacccaagaattagaaactggggggaaatgttttcaatattcaaataagaatttgttgaaagaactaatgtaaacatgtcacttgctctctcaatatatgtaaaagctgggaaggagagcagtgtgatccttaagggcctcccttctccagccaactctcatttatcaagaggctccttatccagccttcttgctttggccctccaggggaaaactggtgtaatgtaggagaaagaacaccggtcaagcttgatgagtcctggctttttcacttattagctttatgcccttggcaagccactgaaacactctgaagctcaatttccttgctggtcagaagaagctgtccactccatggggtgctgtgcagggcgttaaagcccctgataatggtagtggctgctataattacaatgagataaacatttatgaattggctttggctttcctcattgaacaaaaatggagtcagaattatcaaaggggacaggcagagccattgctacattaaggaagtgctttgtaaactgtaaaacaaataacaaattaaaaagaggctttgtattctttcttttctaggtatgatttttattgcttaatagcagcatcaagaaaactgaacttcaaattcaaattgaaaagtgaacctcaaatcaagcagtatttctcatcagtaatgatggggagggatttgaaagtcctgcttaccatgtaaatttgaactatctgggaatgggaccgctctctggcatgcatcacgccagcatttttaccaaaaatggagatttccttccacctccacttcttcccagtcaggtcacatgaaacagggaaactatgggatcaggcaaacctaaatttcattcgtgattccactttaaaacaggaaacttattatctactctgtaggaaaacataaaataatttttgcaaagtacacagtagcaaaggattggcttctttccatcctgaagatctgcagcttaaaacaacttcagtgtgacattgttccctgataccacactcataaagttttattcacacataacagaccttccttcaaatcccacctcctccactaaatagcacattattcaacctcagtttcctcttctataaaatgggcacaataatagaacctagctcacagagtagaggggaacagatgataaagtgcatttaaatgcttagcctggtgtctgacacataataaaatttttgctaacagaattacaataatacaaataacaataacatttcagttctattcgaatttgcacattaaccaacacttagatgggtcagcagcaaaggtttggggtagtttgccattttttccttcttaaatttccttggctgtgcttctttccctcccttcccagggcaggtctgtttcaattcagccgctggctggaacatctggcaggttgcccactcttgacgttttctgtttgtggagccaacagggtggggaggtagggggtttgatcatcttcaccactgagacattggaatctgttgagttaaacattgctctactgttaccatcccctccctttcctcctccctccctgtgaatgaatctggaaagaatgaacctgaagtctatcttgaacagctataaaacctttatggtacgtgggctgctcctcgagtagtggagcattagcctccctgttcgttcctagagtaaacagaacacgtcagcatattccctaacacggggtcaatgtctgagggagcggtgcactccgtgcctggcacctgctagtgtgagaggtctgctggcagccacacaccacaatcaactttgatgactgcatgcactgcagagctcactactcccgagcccttttattcactaatatttatctcaagatagcaatatctccaaatcttcccttttgctcagccctctaaccttacagaatctattataaagtatgtgcatatagctgatgggatatattacatagtacctatgtgtccaatattacatttgcaccgaattttctaagttaactctatgagagaaaccaaagttgaacttgcacccttccttggaggagcatgctggctcttgagtcaggccttagcattgccctgctgtcccgtttgatgtcatccataaagtgctgcctcactactggctgcagtcagtctccacaccattggcctatgatttattacaggtgccatctttgaaggatccatggccccatgccatcacttgactgcttacttaaaatgtttaagtgtgtgatactaggtctataaccttttctgatcccacagaagggacaagggagaacataattcattttattggaggtcaccattattcttccttctctgtctttaccctgtgccggccaaatagtcatactttatccactgtaagtactttttccccagtcagttctccaaaggtttctctttccatattgtcctccaaactttctcatgtctatttcacactcttgtactttatttgcgttctattatagaatcaattagatcctatcctgggcagaactgttcattgtttacaagcattaggtcaccaaagaccaatgacacctaaaaaccagtgagccacaatgactgatacatctactcttgcttcataacataaccttgagaggtcagttcagagtgtgagccccattttactaacaaagatgatgaaattgagagactcagtctcttatttgtggtggcctaattagtccagaagcaatgtcataatcagtgctaaagtgaacataggagagagaacatcagaaaaaatctcattagccggggatggtggcacatgcctgtagtcccagctacttgaaaggctgagggaggaggatcctttgagccgtggaggcagaggttgcagggagctgaaggttgcagtgagctgaggtagtgccactgcactctagcctgggcgacagagcaagaccgtgtctcaaaaaataaaaataaaatctgaaatccatagtaataagaggaagtggaaacatgcccttggctggctaaggtaacaactacaccaaacattttatatcaacaaacaaacaaaaaattcaatccccagttacgattcagagtttgatttatggcagatttggttgtaattcctctctgagatgacaggtaactgagctcggtcctactttagtcatcaaatattttccatgaataagccaagccagaatctatgggtagattttcttccaggcataaagtcattgtaaatccataaggtcatattctttaattttatacttccattgtgaacaactctgcagtggaaaaaataattctatttttgtatttttgctttgaaaataacctattttatataatttattttttctaaatacacacgtattttataaagttaatatattgaaaaacacaaagaagaaaagttaccaagagtcacactatccagatggaacagaaaacattttgctatcttttctacatgtaaatacacatatgcatttttaaatttggaacatacaatagtataccattggtatacataacattgggaaacatacttttttcatttaacaacatgcttaaaaacatttcccctttaatggtggttcttctaaaacctgttttgttgtgttttttggggttttttttgagacagagtttcgctcttgtcacccaggctggagtgcagtggcatgatctcaactcactgcaacctctgcctcctgggttcaagcaattatcctgcctcagcctcctgaatagctggaattacaggcatgtgtcatcacacccagcttaattttgtacttttagtagagacggggttttgccatgttggccaggctggtctcaaactcctggcctcaagtgatccacctgcctcggcctcccaaagtgctgcaattacaggtgtgagccaccacacccggagttaaaacctgttttcaaataattctgtgatggtaggttatattactgtagcaccttttcactttctgtttctctaacatggctatttgtatacctccagaggctacaagcatcatattctcaaggctctatgtggcctactaatctagcatgttccaaatctccaagtacagaagtccaaacacatggaataaaaagaacttccacacactcctattgccaaatccaccagtttatccacatttgtgcccacatagtctatgttctttgctgccaaagaggatgaaccaatctaacaccaaccccctcaccgtgcactggatctcacttgtgccctggatctcacttcctcaggacttctcagggaatctactcttgccattgtcacctctctcctgcatcatcggtttttctttctctgatggtcaccattcaaaaataacatctctcatcttaaaaagctatgttaggctatttgtggtgctatgaagaaatacctgaggctgggtaatttataaagataaaggctttaatcagctctcatttctgcaggctacgtaagcatgacaccaacctttgcttggcttctggtgagggcttcggcaagcttatgatcgtggcagaaggcaaagggggaagatagtgtatcacatggcaaaagagggagcaaggcaggagaggtgccacattcttttaaaccagtggttcccaaccttattggcaccagagaccagtttcatggaagacaatttttccaaagaccagggtcgggggatggttttggaattactcaggtatattacatgtattgtgcaccttatttctattattacattgtaatatataatgacataattatacaattcatcataatgtagactcagtgggtgcccagagcttgttttcctgcaactagacagtcccatctgggggtgatgggagacagtgacagatcatcaggcattagattctcataaggagcatgcaacctagatccttcactgcacagttcacgatagagagcatctaatgcccctgctgatctgacaggaggtggagctcaggctataacacaggtgatggggagtggctgtaaatacagatgaagcttcacttgcttgcccaccgctcacctcctgctgtgcaacctggttcctaacaggccatggattggtactagtccctggcccacgggttggggacccatgttttaaacaatcagatcttgcatcaactcagagcaagaactcactcattaccttgagggaccaatccattcatgagggatctgccacccatgacccgaacaactgcaaccaggccccacctccaacattggggattatactgcaacatgcgatttggaggggacaaacatccaaacttcatcattccaaccctggtcccccaaatctcatgttcttctcacactgcaaaatacagtcatcacttcccaatagtctctcaatatcttaactcatcccagcatccactcaaaagtccaaagtctcctttgagactaaagacaacttctttccacctatgaacctgtaaaatcaagaacaagttatttacttccaagatataatggtgatacaggcattgggtaaacattcccattccaaaagggagacattggccaaaagaaaggggcaacaggccccacgcaagtctgaaacccagcagcacagtcattaaatcttaaagttccaaaataatctcctttgactccatgtctcccttccatatccctgggtggatattgaagtacaagtggtgggctcccaaggccttgggcagctcagcccctgtgattttgcagggtacagcccccatggttactctcattggttacagtctgatgcctggagcttttccaggctcagggtacaagttgccagtggctttaccatcctggggcctggagggctgcagccccctttccacagctccagtaggcagtgccctggggggaactctgtgtggaggttccaactccacatttcctctcagcactgccctagtaatctctttgtgtaaattctgcccctgcagcaaacttctgcttaggcacccaagctttcccattcatcctctgaaatctaggtggaagctgccaagcctccttcactcttgcattccatgtgcctgcagacttaataccacatggaagatgccaagggcttatggcagcttgtgctctccaaagcagtggctggaactgatttgggaccctctgagccacagttggagccagagcagtggggatgcaggaagcaatgcctcaaagctgcacagggcagctgggccccaggcctggcccccaaaaacattctttcctcctaggcctctgagcctgtgatgtaagggggctgccttgaagatctctgaacaaccttcaaggcctttttcccattttcttggttatttacacctggccccctttcagtcacgttaatgtctctagcaagtggttgttccatagcccctcgaatttcttctctaccaaagggccaggctgcaaattttccaaactatgctgtgcttcccttgtaattataaattccaactctaagtcattcctttgctccaatgtttgattgtaggttgttagcagcagccaaaccacctcttgaacactttgctgcttagaaattttctccaccagataccctaggtcattgctctcaagttcaaacttccacaaagccctagcatggacactatgcagccaggttctttgctagggcataatatgagtaacctttgctccagttcctataaattcctcctttccatctgagaccatgtcagcccggccttcaccatccatatttctatcagcattttagtcacaaccatttaatcagtctctaagaagttccaaaccttccctcatcttcctgtcttctgatgaccccttcaaaatcttccaggctctgcctgttacccagttatgaacccacttccacattttcaggtattgttatagcaacaccccatacctcagtaccaatttttcgtgttaggccatttgcgttgctgtaaagaaatacctagctgggcacagtggatcattcgtgtactcccagcactttgggaggctgaggcaggcagatcacttcaggtcagaagtttaagaccagcctggccaacatagcaaaaccctgtctctactaaaattacaaaatttagccaggtgtggtggtgcacactgtaatcccagctacttgggggtatgagacaggagaatcgcttgaatgtgggaggtggaggttgcagtgagccaagattgcgccactgtactccagcctgggtgacagaacgagactctgtttcaaaacaaaagaaacacctgaggctgggtaatttataaagaaaataaatttaatcagctcacagttcttcaggctgtataagcatggcaccaacatctgctcggcttctggtgagggcctcaggaaacttacagtcatggctggaggcagagagggaagctggcatatcacatggaaaaagagagagcaagcagtgggtaggtgccacactctgttacacaaccaaatctcacatgaactcagagcaagaactcactcattaacaggaggagggcaccaagctattcatgaaggatccatccctatgacccaaacaccccaccaggccctacctccaacattgaagattacatttagacatgagatttggaggggacaaacaccgaaactatatcactttcccttgtctcttcagcctcccaaacccactcctacctcatttgtctgtacccctattccctgtttccaattccactcctcccattctctctaaaacaataggagcaggcttcactcccatgccatcaaaactgctcctgtcaaggtcaccagtgacctccacattacctaacctagtgatctcttcccatgccatagcttaatctctgagcaatattttacactaacaatcactcacaccttctcaaaacagtttcttcattggacttctgggacacaacactgtcctgctacctcactgctgcaatgcagcactctcctgctacctcactgctggctcctactcagtctcctttgctggttcctcccaacttcctgatctctaaacactgcagggagcaggaagcaggaagcaggactcttcctttctccattcacactcactctgtaggtcagtgattttcaaccctggtttatcttagactgacttggagagcttttaaaatttccagtgcctggaactgaccctccctcccccagagttacaatctaattggtctaggatgagggccagtcatccatgcattttttaagctctcatgatgattccaatacatagccaaggttaagaacgactggcctaggatctaggtgttctcatctagtccgtggctttaaattaaatcaatacaatgacaattctgaaattgtatacatccagcctgaagtgttctcctgaactccagatttgacaaactaacatcttgacatctccacctggatgcctaacagacatctcaaacttaacatgcctgaaaatgaactcttgattttccttccatccaaaacctgctccttctgcagtcttctgcctctcaaaaaaatagctagcccaatcttccagttgcccaacacaaaacactggcatcatccctgacatttctttctctctctctcactgcatttcaatctatcagtaaatcctgttgactctactttcaaaatatatccaaggttcagtcacttctcatcacctccatcaactgtatcactcccaccctgaccccagttgtcattgctggtagagcctcccaactggtctcactgtttttgcctttccttcactagtctgtcctcaacacagctgctgagtgatgcttttaaaagcacatcaagtcatgtcacccctctgctccaagccctccagtggcttcccttctcactcacagaaacagctggaagtctttctatgactgccccaatctgccctggcccaccacatttctctaagctcatcttctgtcactcttattactcactcagatcctgccaccgtcatctttgctaatccttgaacaaatatagcatattcccatcttaggacttttgtacctgctattcctttcacctagatttttcttctcccaggtatctgcaggccctgactcctcacttccttaaagaccctgtccaaatggtaccttatgaaagagaccttccctgaccaccctaaataggagagttctgccttccccatcactgccagcccctattcaaatacagtgctttgttttctccataacatctcttgccactgacatatacatttgtttctatactgattatctatgcacactagactgtaagctccataggagatgacctttgtcagttttgttcactgcagaatctctacctactagaacaggcctgacacatggtacacatttagtggacatctgctgaatgaatcaaaaaacaaaattatggtgaaccaagagctggaaggcagaataatgccaattcaattgaatctttcaaggctcttagaggtcatttgctataactttatcatgtcactttgagaaaaccaatttggagccattgagagatctactgaaaactcactgcaagttactagtagaaactagaatgctagcctcccagactactttcttccaatatgccatcatctctcttagtgttcccccaaattactctcttctttattaatcatgcctttcatcttaggataattcaaccattaaaaaagtattcttacattatcatcactaagctaaggtattgaactcaactcaaagaaagaaactgagacccaatgaaagaggaatttcaaagacactcaaacaaataacgaagcttagaattaaatagaaaatgggaaaggtctttcctaccacttaatccacatccctgcttccatgccaaactaaagtcatcacatgcccccttccatttgcctttcattgttcccattaatagattagaaaattgaggcagagactaagaagagagaattgtccagtaaaactaacatagaaatgcaatttcgtggtggcttatggtcatgattacacagagacatttactgaagaggaataaatgaggaggcatttcatatctaataacccaactttcatctctagtcacttcaagtatttagtatgtgtgaaggagaaggacactagaaaacatgtcaagctggcttacaggcaccagatctgagaactggaggatttctttaaccattcaagttctgttcatttgctataaacagcaaatctggctcttagccccactcttacagtggaagattaacatgataacagttgcatgacttcctctccctaaagattcatctttaacttcctttggctaaatcacaaagtgtgtttttcatttattgttgagcgaaagagagaatgtagtttcttataaccatccccccaattaaaaaaacactcagcttaagaaaacaaacttaagcaatagtcatttttcaatttgtctataaaagtagacattttaaatttttcattacagagaaaagtttttatttattttaatactacttgaaatagtttcaaagtgttgggaaataagtgcatgaatcaaaggcatatccaaagaatcctgtaaatttcagtgaaatcctgtttgccacagatttggagcatttttcctctgtccttttgaacttgtttctgttctgctgctcttgcaaaatatccttatgtatagtttaagacctctggcggggaagttctcttcatagctcacttgcaaatcattcagtgaatgggtagagatgtctgtgggtggggaagggagctgagtaatcttcatatcagcctggctccttttttccccaagatcctaaaagagcattacagacccagagacagctggccttatttgtaagaaaattcaaatctaacataagctcccagtaccaatatatagaatatggataggcacaggccttcaaatcccactggcctttaaaatgtaaatagtactagcgatcatgagtgcaataaaaacatgtgagtagggagtagggggagggaatgggactaggatgaatggatcctcttttgactccaatctctgttttaatattgaaggcatggagtttttatcacccaatcccagcctacagctgatggctaaaattctggccacccaagaagaatcttaaaaatataatgaaaatatattgttaacaaatggtcttctaagatttggtagtgtgtgcgcacactgtggggctagacttctcagtgcctaacatcaggaatatccttaacccatctggagacttgtcaacgctacttaagaaggtccttggggccccatcccaaatttgagagtctttcctctctgaaatccaaagggggagcgagagtcatttatctagaaaatatatgaccaacggttgaaacttggcatgatgtcaactcaagtattctcttactaggcacacaaaaaaagtcatttggagaagacaaggcacctggaaacacttctattctgccttgattcaattcaataggtatttactgaattgaacaatacatatttctaggcttgttgacccttctcaacaccataacctaatgtggacaacgggtcttatgaataaaacatatgtaaccatctccgctgaagaagtcaaacgtttatgacccccagaattctgagcttctggtcctgcagtccaggcatcttaaagacttccggcattctgctagtgttacattcattcattccatcataactagcaagcttttagggcaaagaatgaggattcttcctttggtgaaactaggtttgccataactgtctactcactagcactccttaggtcacaagtcactacatctagacaagggaaaaattcaagtgactccttcatgtagttgtcattgaaagatgctaacaagagaccattttcccagggccattgacaataagatgttttgctgagcatgcagttgacatgaactccacacacagacaccttcggccaactgtcagcacatttgaaattcacaccttcctgcctgtcatccatcatttctcttcatggctcccagcaaagatgactccaggctttcttgaatttgtgcacaggttgctgtttaagcttcccccaatcactgagtgggtttgtattgcctcctcacctagatacctctcctaccattggagactgcgccatcatttactcccaaaaaagaagactctggggacatgctaaatatatagcaggtattcaaaaattctttctggatagatgaatgaatgagtgagtgagtgaacaaatgaccatgcctgcattcattccttcctaaccatgtattccctatcttccatggctttcattgacttaaaatattattttgtattttctttgctttcaagaagcagagtaaattctataatttcttttcttccatattctttctcttaacctctcataccgatcttatcttgtattcagggctcatggcttctcatgtcaccacgttatcgcccatgtggatggggtttgtgcctgcctttgaaagtgatcccgaaccgaactccagaggcacctccttttcatgactcctcacctcccagccgcccctgatgcccattttctggtggtaccatgaagcctcccacatctgaattaccttgccctgtatatttgcacatttgcacatatgttaacataaacttcaagctcctccaaaccaacaaagagaatcctctgtcactgctatacaaaaacaccttccagagtataacgctgggtttaaaacaatggtaggatcacacccactaaaagacaaggagggtagggtgaaggaatctcaaatgttttgagaggataatagaaattgtgccaggaaaatggaatcacctgtattgtcaccaatattataggtcctatatcatttttcaaatttttggtaatataataatataacttctataatgggaaataaatatgcttaaatggtactcaaaatatcatctaagcaacaggatttgttttctctaatttctaatcctgatactcatgcctgcctcaaattaccaactatcagggttttgggaaatttacagagatcttagaaatactctcagttcatagatcttttcactgaagctgaagaaaagagaaaacagaaactaaggtctttgccatttgactctactcatgctacggcagcagactgcatcttctcgctctttagtggtaatccacattgctgggtccctcccacttttcttaataaccactggcggtggcaagtttccctgactcagacaggcagtgctcatcgcggacagggcctccgacatttgactggccttgtaactggtgagtcatgaattccctgggctttagtttcttcatttgtaaagggaagctttatggagtctttgggaggattgaatgaaatatgcaaaaacactttgtaaatgactgattcctaagcccaatattgaatgcttagtacgtgacaatctctgcgctgagaattccacatgcctcacttcagctcatctgagtgtcagcgctacatagggaagttctcggggctcatcccacattcaaagtccttttccctctttgaaatctcaatatggggctattgcatttatctagaaaacacttaagcaatagttaaaccttttattttgaagaataagaaacttggctaagataggttacttacttacctatggccacacagctagcacatgcaaagcctgggattaaaccaggtctatctgacttcaaacttttaatcacgatccaattttttgttgcagaattcctttaagagctctaaattaataagtggtgagatggcatgaaaactctttattcttttccttttccacaagcattttgagaaatcaaaatggtaatgtacattacgatatttggaaagccataaagggctaaacaagagtaggttacatcagtcaatcactactcacccacaataaaggggtggctatgttgtttatacgattttactattaaggcaatgtcttgagtgaatataatttatttctgtttatagaaagcctaacagcctcgaggggaattgcttattgagatgtgagccatggattacttcatgttttgtatagtacagtcacagttttaaaaaacaatctagaattccctgcaactggcaatttcattgctgtatggcctgaaatgcctccatgcccaggtaacgttggggatcccttaaaacctctccctgtatcggctccaagcactggctccctttaacccctaagccctcacagaacaataaaaaataatatacctttattcaacactcttacattttcaaagtcctttctttatcatttgatatttgcaggaatgctgaagttatctgagcgggtacttggcctcattttatatgaaggaaatttaaatgcagaaagactaagagattcatctatgtttccatagacggagtatgctgcagttgagatgtgaattcaggacacgtgaatgtccacagttttgcactctcctattgatctgcttttacgggatttcatcttggttgctatgctacctctcacagaagcatctgcatttattcgcttccattctagtcaacaaaaacttatggagaattgactttgtaccagggatcttttaggtgaggaaactgaaagaggaaaaagacatagtctctgcactaaaagagctcccagtctatagaggggacagacacacctacctactggacaacagaccctcatgtagtaaactagagaactattctaaaacttccaaatggtagaatgaaaggctttataccagttaaaggagtttagacatcagctggcagctggggagtggtctggtgatatgacagtggacacttgggctgcctgagaggagcatgcgttggtcacataaggttgcctgggcagagatcagaagagatggacctggtgtctctctcccagtttcctgtattccccaggcatgacaagcccaccctctgtgactgctggtggtctggtcctggtaagtggtccatctgcctcttccaaccacagcttttatccccatcacagactctgggcctaccaaatcccttctgcaatccccagctcccagggcccaagagtccagtgtgctctctcagcctctctcccctttcatccataggcagactggatccttgtgctagaaatccttccagaaccagcaatctgggccccatctttttctctggcaacagaaaaaggcagaatacacagcccaggaagaactctggcaggaaacccctgaagggtgacccagaacaccttaggtcttggaaaatggacagggagtctggaaacatggccccaggtgctggctgcacagatctttgctttgtttttttttaagtgtattatttttatgttaatttttttatttccataggtttttggaaaacaggtggtgtttggttccatgagtaagttccttagtggtgatttctgagattttggtgcacccttcacccaagcagtgtacactgcacccaatttgtagtcttatcctcatctctcaccttatacaaaaatcaactcaagatggatcaagcacttaaaatctaagacctgaaactataaaaattctagaagataacatcagaaaaacccttctagacattggcttaggcaaagacttcatgaccaaggacccaaaagcaaatgcaacaaaaacaaagataaataggtgagactgaattaaactaaagagcttctgcacagcaaaaaatccttgctttttaatatgtgccagtgtgtatgggtggagaaagagtggggtggccatgaaaatgcaccatgcagctcttctgctgtggggggcagagttgactgacgacctcagccactgccctgctgggtccaccgctgtggctatgtcaaaacctaagccatgctgccagcaatttgctcccaatcaaccccaagcacagcagggagtgagtgcaggcccactcctgtgagaatcagggctcctctaataggtgcctgggctcgaggacatcccagaggcctggccaaagctttcttgaaactgctctagagtctgggacccttcctatccaatcttcctttgttcccgtctcctctgcaggtgtgaggctgcatctgggtctgacgactctcgctgccccctcccctttatccttcacaggtgtttcttgtgcacatcgatgcacatcctggcatctgcttcttggaggaccagaatttacactgtatttgatgaaacttaaattaatctaaactgtgataacgacactttatacatcatcctgagctaagaaattcgaagcaaaaaagtcataaaaataaggcttggtagtaacacaagtaataacaattacaggaatttatagaaactgcttaccatttatgcctaattaccatacagagcaacagcaattatacagattattaaatacaggtcaaattaacattgttgagggtagagtgtactcgatttaagatgtggattcaggacactcagatgtagtaatccatattgattacggcactgaattctgttcttccaatcttctaaaaatgactaagacaaattttttaagattagagagtgggtggcgtggatgatgagaaattacttaatgggtacgatgtacattatttgggtgatgaacaccctaaaagccttcaccactacacaatctatgcatgaaacaaaactgcatttctacctcatacatttatacaaaacaaagcaaaaataaaaactggaggaaacaatgtggcaaagaccaattttcttcaaaatccacataacggcaagggacaaactttaacagttccacctgaataaacttaccagcaaagatttgtccttcttgtgcctcaccctgggttatgagatttcaagtataagcaaagaaactaccttcatttcttaagggttatcttttcaaatgtgttttgaaaaccaaatcctgcctatctgggattgctccatattctctagtgaaaacagcttcataaagtgattcatcctctccaggccacctgagcccatgcctggaaatgtggtcctcttatttgctaacaaataagggcttactcaggacctggaccaacaaacaggcaatggcttgcactacctgagccatggagcccacaagttcaggatttaatctgcaaaatccaggcagctgctaccaagtgtaatcgtgccccatctgtgaacacctgggcttctcaccttcttcacagtgccaccaggtgtgagatagtaccatccctgggtcacagacaaagtgcgacaggaaaggccagaagttcacaaggtatgctatgaacatacaagatgacggtaagactacaaatcctacctcggggagcatcgctcagctcttcttagcttacaggtttggacaccatgtctcagctacccttgactaaggctgagagaccaggatgggcatctgcccagaaggctccgggggcttctaacacaaggtagaaactgccaagtagaccacttttatgcaataaaccttcagcaggctggtggagaatgggagtaacctttcttgaaggtctatcttgaagataatcatccaggccttatgttgggcattttgtcattttaccatctttaactcttaccacagcctcttttcctgatgaagacagttagggccaaagaagtttaaataacttactcaggtcactcagacaggaaatggcaaaatcagaactggaacgagctgcttaactccaacttctctttctacttcgtattaactcttaggagtctttgaagaagaagaaaggaaatttgggtcacataggtattcgtttcctattgctgctgtaacaaatcacccccaagttaatagctgaaaacaacacgtttatcatcttagtgttctggaggtcgaagtctaaaatgggtcttgctgagctaaaagcaaggtgtgggcagggctgcattccttctggaggctccaggggataatctgtttccggctttatgagtttccaggtacctcctcccacgttccttccacgtggcccctccctccatctttaaagtacaacacggcaaccactgtttctgttatcacacttccctcttccgattttgactttgttgcctcccactgataaggattttggtgattacactgagcccaccaggatagtctccctgatctcaagatccttaacttaatcacgtttgcaaagtccccttttccacggagggtaacatattcgcaggtctggggattaggacacgcacatcagaatgttattctgcctaccacacatatatagtgggtcccatgtctcccctcctttgccctattgcatggcttgtataagattctcatctgtccatccaaatcacagatttgagggcttctaccagaacatgaagctgggcaacatttctttgcacaaacttgtacatagctgtcacttgaaatgccaaaaacacggttgtaatatttcaacaagctaacatatgggtacttcttactttggggttttttttaaacttattttattaacagccaaataattattgcacatactcatgggatacatagggatgttttcatacatgtaatgtacagtgatcagatcagggtaattagcatatccaacatcccaaagatttatcatttcttcatgttggaagcagcaatattctccttctagccatttgactatagtcaccctatagtggtatagtggtaactatagtgctgtagttaacgatagtcatcctacagtggtacagaacactagaacttactcttctcctctacccataattgtgtatcctgatctctcccttcccctgcccttcccagactctatttttaattgtttggctaaggtggatggtgacattggagctgaaaacaaccattaatcctccttaataaaaattaatttgatccttgaatttttttctgctttgaatgttgaaaagttgacataacatttaaatcttcagggtaaccaaggacagtagtataaatcatgtcctttcactcaaactaatagttttttgcctaaaagcaaactgtaataagcagatgaaataaatattttgagcagagtcatttcctgttgggtaaaaaatgaatactttaccttgacattaagtatatacacttgttaatattctgtttattatttgaaaccttccgttataatattattccttattatttattcttcattattatttttccttattatttatttccttattattatttatacccttattattatttccttattatttatttcattattatttatatccttattattatttatttccttatttccttattatttgaaatcatcctataatggaaatcatcacatacaaagtattgtatgggtatttaggagtgagtttatttctttgaaatatttgtttccctaagttagaatgacttagaaaaattagcacaaaccatgcaatatcaaggatgtaaaactgacttgtatctgaacagacgggaatttttgttaaagagtattcttacaagctggtatggcttttaaaatggcctccacatgtccggaggatttgtctcattttaagccagcagtgttgctccatctgaatgctggagacatgagcccagttcacagttagcaatcttcttcgcacattacacacatgccaggtgacattcgcacacctgactcaccttcataggatacctacatcgtagtgaaactcgagataatgtgggagggggaggagtaaagcagtggagtgatttataatcactacagttattaactccagagtcacttgtttttgatggaaatattacaggctccatattatatgcaatttcagagtgccaattgcaaccctgttcctttttctccttgttaagaaatcatattggcatgcaagtgagcaagaatgaagaactacaagaataacctcaaatgttgaatttgatttaatttactttaaaaataattgcaactatatttatacatatattgtacagatatgtgtacaaatatttaataattatacacatcaatactttatttttagatacaaataataagaacaggacagttgatataaagcagaaatggggaggtctgggctgtcttccaagatcttttgttttcaacttgacattgtctctttttacatctgctgtgaacaaaatggtgaagcagataaaatataccttcgatgtctcccacgtcttatatttggggttccctgcaagcccttggcacccgcgggcctggctcccagctcccagggcctgtgcagtgctgtcctgcggcattgtcccatgctcctcagcttctctttccccaggaaaatttacttctccagtgttttgtgtcctaggaccctgttctctgtgctgtgaatatgattactcttgggtaaatgtgctgtttctctttgggtcacatattgcatttcagcaggcacctcccagagtttgccttaaccaaaggagtttacagtaggcagctgatatctttgggtgggtgtagcctgaaattgcactctatgctattaatcctttcagtagagttgggtttgccccttccatattatgtctttaattgcagaatggtgctatctggaccctgagaaaagttttgcttttaactgaatacccatgtacacaggatctgatagaatacacctgagttccttacttctgctcaagatacacttataacccaaacagagcacctggagtggtttctctaccttattcagcttattctagcagcttcttaaacttctttcttaattgtgtgggccaattactcagtcaccgtctccctatccttcaaggagcctcccacttctatagagtctctctctctctccatcgtccactaccatgagcctcttggtccttagaaacctctaattctccctcccccctgagattctttccttctctttgatcttcagaatggggatgtcagtcatttccttccaactaattttgttttcttcttttttcccagatgaatctgaataagactttgacttatgaaaacaggaggaaatggaaaagcaatcctattagggtcaaatatcttcaagacgacacactcgtacattgccaagaaagactcagcataattcccttgtgtttttacactacaaaaggtccctatctcctttctgtagctggagttgcttaaatttgatatgcacataacttcagaagggggtagacagagcccatgcctcctgcaaggagtgagaaatagacctaaacgatcacagttcattcattgattttgcaaatattattgatcatttactttatgtcaagcactggggataaagtaaagcagtgggatctagttccctaccctcctggagcttctgatccagattcctagagctgaaacaggctttgaagacctctcaatttgtggtttccaaattatctaccaaaggtcattaatattctatgcaatattaattggtatttcttggagtaggatgacgtgaggaattgtgttccatggtcaaattaagttcaaagtgttaggttaaacaaagttacattagtttcttcatgccaggctactcagagcctttctatgttaacacacattgtgactctctgacggtgagggggagaggatgagatgcaatatgatcatttgctttccccacttatttcaacacaaatcttttctgaagagtacccattaataaaaactgttggcagaacatacttctgttaatgcttccaaagccaaaacctaaatccacgtttccttcagcacatgaggaagctgcagtgacctagaatggtgaggggcagaactgaggcaagaacctggatctcattattattttcttgatcttttacccattccattctgcctgtttctactctctttctcatcccctggaaagacatataaaagcagtgtttcttccttctttatttacctccttcttagatcatggtaatggtgattgtcttctcacctattaactggtttctttctctgctgtctatagctttgggtcataagctcttaaaagtcaaagaccagcttttacacaataaactcatgaacgattagtgatcagtaaatgcttgtagccaaaaagcaatggttgacagcttcctatgcacctctccccgcagcctcccacacaccttcctcctgtagattctctctccttgtgccaaccgagaactatggaggcctcttttctcctataacaatatcaccactgaaataggttatgccttctaaactgctttaaaagtttcactaataagttttaaaactgattttgcctattacacaagagattgcttaattattaatacaattcactcgtgattaactaagaatacacagactattcatcctgtcatacaggccaggttgtagatgagagtttttgtgagtgtgagagaatttggacttatgcatgtatgcgtttaatttaaaaatctacttagctacgaatcaggacatacggacgtgattttagactttggaaacttgagggggaagaaacaatctctgctatctcgacattaagaggtgtgtatctctgtccctaataagcaaggaggggctgctatactgccaccttgtggtaaatatgcacaaagccagtaaataaacacaaccaaccttctccttagtgtgttattacataatgcccaaaagaggaaaatacttttattaaaacattattcaggaaaatgaactattttagcatgtggataattaaatatatattacaacatgtcctatgtgacagaatgaatattctgtatattctccctagtatttaatcatgtgtgaatcacatgtattaacaatttttatattttatgaaagtttatcgataaatacatacatatatggagagagagagaaaaaaaatctcttacctgaaatgcttgggatcagaagtgtttcagattttgaatttttcaaatttggggatattcaaatacagataatgagacattttggagctgggacccaagcctaaaacacaaaattaatttaagtcttatatacaccttataaacatagcctgaaggtaagattatacaatattattaataattttatgcacaaaacaaagttcatgttcactgaaccatcagaaagcaaaggtgccctgtctcagccacgcatgtggacggtctgtggtggtttggcatcactgtcattcctgactgaactgatacgctaccaagaatcattgttgacatgtgtacaaacagaagtatttcacagtaaaaaaaaatgacataccagtcatacagtgaaaaaatattacgttaagggtaaggaagcacagtagcatcgccagaacagctgggggtgctgaggaaactgccatgagcctgtgttttgagtgtgacccaccacatgaggtcagatgtggaattttccacatgtggcatcctgctggtgtttaaaaagtttcaaattttggagcatttcagattttcagattagggatgttcaaagaatatatacatatataattttggctcttaaatcagattttgccttcataagcaaatcagcaaacacagtcaccactaagcactcacttcatgtgtgactcacactgtgaagggatttcaagtcttttgacagaccaagacaggaagcacatctcaatacactatgaagcaagctttggtgggttagattaggagatgttttctcagaaagtgactacttctgggatctctgttcatcacctgttgaggggtcaatcccgaggggttgagatgctctggcaagaagggacaactaaggacatcccctcacttcttgacagtcagcccctttcccacagggtaagggattcaaccaggaccaggtaaaaataatattcattcactctttctttcatcagacaataattattacatctaccatgtgtcaggcacctgctaaatggtggaaatataatagtgagcaaaatcaaacacagtctctgctctcatggattttacagagtactgattagacttgaccgaggacaatggctgaagaccaacagaaagtgatcattttacatgtgtggtcacttacacattccaacctgcccctgaaagaacttgtctcaaaagagctaaaaacagaactaccattgggcccagccatccctttactgagtatatacccaaaggaatataaatcactctatcataaagacacatgcacacatatgttcattgcagcactattcacaagagcaaagacacggaatcaacctaaatgcccatcgatggtagacttgataaagaagatatggtacatatacaccatggagtactatgcagccataaaaaagaacgagatcatgtcctttacaggaacatgggtggagctggaggccatcatccttagcaaactggtgcaggaacagaaaaccaaataccacatgttctcacctataagtgggagttaatgatgagaacacatggacacagagaggaacaacacacactggggcctacttgagggtggagggtgggaaacagtagaggatcaggaaaaataactattgagtactaagtttagtacctagatgatgaaataatctgtacaaaaaaccctcattacacaagtttacctatataacaaacctgcacatgtacccttgaacctaaaataaaagttaaaaaaaaaaaaaaaaagaaatggagagaaaggaatctccatgttaaagcccactgaaagatcatagttgtggatgtagcccactccataggtgtgcttagtatgagtctagcactgtgctggaagatactgataacttaaaacccagccaacgctttagagtagctgaactgtcattacagcacaagacacacgtgaaaagttaattaacctggaagatcataaagcagtataaaatacaatgctaaatgaatgaatggtacaggcagtacagaactgagcagagaaagctccatgaaggagacagcaattccttaaagctgtggagctgaaccttaaagatgagcaggaactgggtaggtgaagagacagaagaggggtgatgggaaaacatcctaggtgacagaaatagcagagaaaataggaatgagatgcacttggaaatgtacattgaggagcatgagaaggagtttgagattccttgggcctactaagaagtctatttttctgagtataaatagaaatttactatgttcaggccaggcacggtggctcatgcctgtaattctagcactttgggaggccgaggcaggtggatcacttgaggccaggagttaaagaccagcctggccaacatggtgaaaccctgtctctactaaaaatacaaaaattagctgggtgtggtggcacgtgcctgtagttccagctactcaggaagttgaagcacaaaaatcgcttgaacccaggtagcggaggctgcagtgagccaagatcacaccactgcactccagcctgggcaacagagtgagactctgtctccaaaaaaagaattaagaaaaaaagaaagaaagaaatgtaccatgttcaaagagtgagctctgctcttagagtttctcctattttcccttctagccttattggcagagctaaccagccgggtggacagaaatgtgtcaccaaataatagggtcactgggctgaaccagatgtgggtggaagaaataaagacctattcccatcaagtctcctagctcctcttccctgccaggatttcctgtcctgaccttagggcagagcctgcatcttcccttcaggaagcagggtctggaatatttgtcatatcagaaaggagatgagaggttctgtgagaggtgttcagaatagaaaatgcaggtttacagctcagcagaggcctgaacagtaaggtagagagtggaaaaaagagagctgtggggggcccagggcagtcacatggcagaggcacctggaaaataactgcccagcatcacccacctccctcatcctccatgagtatctcctgagctcccatcacctcactgctaggtaacctccactcaactaacttccctatgctctttccttattacatgaatcacattaggttaggctgtgttcctttacactctgttacttaatatttactttttttttttttttttttttgagacggagtctcgttctgtcgcccaggctggagtgcagtggcacgatctcggctcactgcaagctccgcctcccgggttcacgccattctcctgcctcagccttccaagtagctgggactacaggtgcccaccaccatgcccggctgatttttttgtactttttttagtagagacggggtttcaccgtgttaaccagggtggtgttgatctcctgacctcgtgatccgcccacctcggcctcccaaagtgctgggattacaggtgtgagccaccacgcccggccaatatttactttttgagaattaaaatgcacaagtgtatttaataccctgtgaatctttactcttcacataaaatcggttatagctttctagcataggatagggtccaaatccaacctaccacctatgtttgtaaatagagctttattggaacacagccatgcccccattttaatgtattgtatgaataactgcatgctacaatagcagagcagactggtggtgataaggaccgtgtagcccacaaagcctaaaacacttaaaatctgggcctttacatcagaaactattgaatctgacataaaatatacagtatgtagttaatgatgacaacacttgggttcaaacttactgggcaaggtgatgtaatctctctaagtctcagttgtctcacttccgaaatgggaacaataatgcctgctttgtctacctcatgacactgcagtgaggagcaaatgaaataacacgtcagtgtctatacaagacgaatgcagaacacaagtgctccagagtccctaatcctcccactgcagctctgcggcagctctaagacaccgtcctacattcccaggtagagtgagccccatcttcctgctgactggatttctttttctttttcctttttttggaggtggagtctcactcttgttgcccaggctggagtgcagtggcgccatctcagctcactgcaacctccacctcccgggttcaagcgattctcctgcctcagcctcccgagtagctgggattacaggcgggtgccaccacacccagctaaattttgtattattagtagagatggggtttcaactggtctcaaactcctgtcctcaggtgatccacccacctcagcttcccaaagtgctgggattacaggcgtgtgccattatgcctggcctggatttctcatattggttggattctcaccaccctctcccactattgctacaaaagggctcccaaatatgcttctggcccctgctactctccttgttctttggtattttcgtcacctccagcaaattcaaagaaaaggaattcagtcattgcattgatgggtaagaaaggtttagaatagagaaagccacgtgcagatatcaaaagaacactgtggctagacccaagagtgagtcaaaggtatgctctgatgtttgaagtaaaatgagaagactttgaagacagtggccagaagtttacatttgatgcaatgaatgtgggaagtccctggaagactgcatggtaaggctaaagtagcaggtgcaaaaaaaggatcagaggactccaaggagctgacgttctgtatagggcttccacccaggttccatttgacactggggcccagcctaaaagttacctttcacagcctcccacccctgacccttgggttttctcgatgatagagagcctggctctgggcctgacagtgagctgtagcctccaactgaaaggaagctcagcaagaatgaccttgttagactcattctgcagagcaccgtggatgtcagtgagcatctcttggagatttatggccctgaacctagtctcctgttacttggtgattctgctgaattttccattgagcaataagggcaggataacagcagagctgctcaaggttagcagccttctgaagtccacccagctccacaaaacttcttcctaatgatatacagaagagatttattgggatgtttttgcaggccaggaaattgctacatgattttgtcattgacaaaggagcaaacatcactgcccactttctgttggactttctccactttgctagttcttcaactggaaatgatgaaaataggctgattcctggtttagttaccaggtgggagggctacccaaacaatattccaatttcattgttttcatttcagggattattgatggcaactttagggcataccttatatttgaacttccacttggtttcctgttcttgtgggattcatttgaattgctgctaagttgggcattcaaacatttctcttatgttggttctaaactagtgagggaaaaccacgatgtcagaagtaattttatttccactgtcttttcagatgtgtcagggctcttgatcaaaactgattttccaaaggagcagaaaaccaaacactgcatattctcactatacgtgggaccagtaggaccagtaatatagggcagttaagaccagtaaacaaggaggaaaggtcatcaaagatgattttcttttgaaatgggagattaggagaatagtggggtaactactgatagcagattgagacattagaaagacgtgccattttcagtgtttcttggttttttttcttttttataaagccatttatcttaagtgccttttgaaaatattaatcctatatttcagttgcattcaatgcagtgttttggcacccattaaagccatgggtatagggagaagtgcaagcgctcccaagtttgtgagagagttctgggtctttggagggagggattcagcctgggaattcctagattcctgcaagcacctctgagtcactaattctttaaatcacatgttccgtcagctaaaataaattaataaataaataacaataagttactctaagaattagaagggatgtagcctcagaaagccctttggaagctctaaagtgtaaaagatatccctcattccttctcattccaaaggaagtcaaatagaaagtaaaactagaatatcttatatcttacatagaaaggtgaaacgacattctctctaacagctctcagttggtaatggaaccaaatgatcaataccaggccacaggctcctcgtccctcaccaggaaaggagtcctgtctggccggagattgcctccctgtgtcctcaggcccacctcggtttctgcacaggctccccgctcccacctccccacccccgctgccattccctgcggggtgagctgtctgcaaagctccactcccttccctttcccaagtcacagttacaggaattattgcaagactagttctctcatattatatttcattcagcagcagaagagccactcaagggttttggcttctggaacaagaatgaaaagatctacaaaatactaagttccttgaatagaatcttttaaggcgatttggtgaaaagtgtcagattggcagccacaaagtctgagtttctgtttatttatctagcaggtaatgattcacaaagccatacaaatatctcaccagcctacaagtccatttcagacagatgactaggataatgtaaattccatgtaaaaaggtagctccttgctcattctcatgtgtaatcttcacgagtgaagtgccttctaagcattttcacacgaattctgtcacttagaatttcttgcaaatatctaaaactagagtgttgatgatggtatataaacacaccacttcacctgctttagctaaaggtgtctttttttaattgataggccatttttagcaattttagatttattttaaacattgagttatttgtgtcttttttagagccatttttcttcttaaaagctacgctatgttttgctgagatgaaaatacatataacttgttttccaaaatgggaagaattgttcgagagggtgagcatggaccctgcaaccagatcctaagcccacccttatcagctctgcggtgtttggtacgtgaattccttattacctctgagtctcggctttcccatctctaaaataggaataacaataataaacaacataatacaaaggattataagaattaaatgaaatggcaaaggtaagtacctaacacagtacagaatacaaagtagatgcttaagaatgatatgttatattccaaattcacattgtatgttagaggactaaaaattactgtatcaaagtataaatctaatctgggattctgatctttttgtatgagtttgttctgcctgaggtcttgtgctttaaactaaagaaaaggttcttgtgatctgcacagaagcagggaattggagacatctggttccatgcagtcttgttaactgagctttttgatctgctctgaagaggtagaattagagggaaaagtcaaaagaaaattgagaaacagcctctggatgagggcagggctccccctggtagggaggaatggtgaacaaaacagcagagccctggagggagccaggctgagcatagcaggtgcccaaagaagaccaccaccaaggcccacagggccttcccaggtgccactgatgcagtctggtaaaatgcaagcatccctggtaactgccagaaatgcataggggaactgtgcattactgcccagcatgatgaagtgtaaaaaattatgggcagtggggttggatgtggtggctcacacctgtaaccccagcagtttgggaggccgaggtggatggatcaactgaggtcaggagttcgagaccagcctgaccaacatggtgaaaccctgtctccactaaaaaaaaaaaaaaaaaaaaaattagccaggcatggtggcacgcacctataatcccagctactcaggaggctgaggcatgagaatcacttgaatctgggaggcagaggttgcagtgagctgagatcgcaccattgcactcaagtccgggtgacacagtaagactccatctcaaaaaaaaaaaaatatgagcagttgagtccaggtttgaatgctatgagacctcatctgtacttttataggctatgaaacctgaggacactcagactgtgtcctcactcaagtcatagacagtgactacaaatcagtcaacccagtctgagagcttttttccaccgctcatggaagaaaaagagtaataactttggggctgtacatgtgagtatacatttgaggggaaagggaggatggcaggctaagaaaacagaaaagaaacagaaaacaaaaagagcaaagatgtatttgctaaccaagaagacatttccaaatatttctctcatgccccttccagaaagatttcaaggccaggaaaataaaaatacctgtttgatgccaactgattaaacctccagggaaaaccagaaaatgtcttaattttcttattcaagaactccttttataatcaaacagaagaggagaaagctttaagtaggtgcccgagtcacaagataaatgaaatgtttgacatgttgcttagttctacaaagagaaaattccaaatgatttataatgcaatttttttccgatttccagtatgaaggagtcttgaaatctcataaacagaatataagggaaaccactttttttttttaacatggtaaagtaaaggcttccccagacactaattaacacaattgtgtatctgtgacttcagacttaaaaaggcaatggcttaactccaaaggtcaactatttttggatcctccagtctctccctgtgaataacactttgttgaaccaaacacaactctctgagagtgatgtgagtctcccacctccctgctaagacaagcatttcagtggtgaacttccctgtgtttctttctgagaaggcagatcctaacatattctctaaagatggtacccctagtcccttagaacttctcccaaattatcacacatcattagataaaagagctgtatatgtccagtttctcacaaagaaaccaatagtaagctaaaagttggggtacaaacgcttttaagagaaagacttgatggtctttgaaactgaccgttttccatgttcgtttcttatgttaggccttagaaccaggcacattaaaaactttttcaatctatcttgaagtgatttaattgtaccaagtgacttttttgtaccaagtgacatgaaaaagaaataacagccatctcctcagggaaagagtgaagggggcgtgcgaggcagggggcaagccatacttttaaatacaaattttcatctttaccccttgcttcaagttgaagaacttgtctaacttgactcaaggctagaaatggtttggcaagatcaattcatcagtgtaaacagctcccttaaactctgaaagtagtttttgttgaaattaagcttagagttgcatcttaaagaattgttagatattgtatggtttgtttcatgctttttcctatttatatgtgggggaaaatcctttttttttttttttttttttttttttttgagacggagtctcgctctgtcgcccaggccggactgcggactgcagtggcgcaatctcggctcactgcaagctccgcttcccgggttcacgccattctcctgcctcagcctcccgagtagctgggactacaggcgcccgccaccgcgcccgggtaattttttgtatttttttttagtagagacggggtttcaccttgttagccaggatggtctcgatctcctgacctcatgatccacccgcctcggcctcccaaagtgctgggattacaggcgtgagccaccgcgcccggccaaaaacatgtaatacaaatacttgtaagaacactgttgcaaaatatatgttgaacttaaatgataatcagtacaaaatgatggaaagaaaatgacttttcttcccatgatattaggcgagatcctgtcagatggtccattgaaattttgtaagcaaaaagaagtcgcgcttacgaataggtccatcaaaaaaaaaattcaaaccatgaaaaaaatttttaagatatatctttgttgtttcacttccatttttcttgttaacataaatgagctaatattcatgtcagaattataactcttcttgaatggcatagcaacttctttgctgaatccaatagttattaagcatttatcactcattttgtgacattcttggtggctataaaattataaaactaatggtggaatttgccaaaaaaaaaaaaaatagcaagtcacactgcagttgtaggtgtaaacccaaacacaagtggctatatgcaatgtttaataaaggatattacatatttttaaaataataataggtccatcttctcgggctcctgggacagtggagtaattgacagctgtatcatgtggcagccagtagccccacccattccccccatgtttgacccaccgtaagaacacatcacaattacatatgcgtgtcaaatactaccgaggcttcccactcccaccaactagcagccattctcccatctctatgttggtctctcaagtttccctccctccatctcagtttaatccctctactctgctctaggtctcattttctcctgcctaccctcttgggaatctcactccatctatcactgccgctctctgggatttaaacttccttctttccagtggtaccttcttttcatcaacatgaaactcatacctgagtctttttcaccttacaaaactccttcttcagctgctatcctctcttctgctcccctaggcagccaaagttagaaggtttacctgggcttgcttcatcaacttctttaccttcctcttccatcatcctcctcaatattccattgaagctgcttttgccaaggttattgatgttccccacattatttagtctaatggacactcttctgtcctgttgtgacctcccaacatgttttgggcattgtttaccctctatccttctcagagccctttcctgggtttcctgacaccactgtctttcaagttctctcctactttctgccatttcatttacggagtcctgctcttctcccaaccacctcaaggtaccatcccaggacagctgtgccttgcattctgtactctttcctagatggtctcatcaatccccatggcttgatgttttggttgtcactgaacttctgatgactcacacatgcatgtctctctgcagaccaccttctgagctcgactcatgtatctaattatctttgaataacccatttggatatctcttgagtctcaaaaattagcatgcccaaagctgaacttagagtgattttttttaatgaacatgtttaaatgaacttaatcatagttacattttaaaatgtacccttctgatcagaacccttcaatgtcacccatctgctctaagtaaaatcctaaggcattataaagcctacaacaccctgaataatccctctccactcatttgcttccctgacattatctcctactaccatcccccaactcactactctagccatgctcccaactcaggggcctttgcacttgcttttcctatttttccacctgatataagcatttgttctctcccatccctgaagacttcagtcaactatcacctgttggtacggctttccctgacaatcgtacataaaatttcaacacgcccactgatctagcattctttaacctcttttcctgacttgtctttataacatttatcaatattggacatactatatattttattgtctaccttcctccatagattgtagactaccttgcaggaatgttggtcttgttattcattgttttattcctaatgcctagaacagggtctggcatataaaacagaatcaataagtaactatggaataaacaaataaatgaatctccaaacctgctatccatcatttcagtaaatggtgcccccgtcgatccagctgctcaatacagttttgactcaactcatttgcttttgccccacattaaaccatcactcagccctcctgccatctccaaaaatcatcttcctctcccacctcctgtcacagttatttcttattcatcttttaattccagctacacatcatttttacagactgtgtctgtaatgtttccttttaaatacccaactagacctaacacatgtctggtccatactaagtgtccatcaggtatttgttgaatgaataaatggtgtttctcagaaatgccagattaggtctcccagctctctgttgctatcacactctgtaaatttccatacatcactcatccctcttttcaataactacttagtttgatgttcttcttcttttctaggctataagcttcctgaaaacagaaatctacatgaaggtgggaaagagcaagggaaggtcctaaaatacagacagtactggcctgactatggaagggtcatgctgataatacagggaagccatctgaataggttggggacagagctgtgattacagaggcatcagtctagagaaaagaagctcattctattttttgataccaaaggggaaaagggagtatcataaggtaggcatatttggtctcatacttctatataaatcagttccagtgctggttaaaatatagtttggcttgattattaatcactaaaatttaataaattcttttctttttcttttttgagacagagtcttgccctgtcacccaggctgcagggcaaagacgcaatctcagctcactgcaaactccgcctcccaggttcaaatgattctcctgcctcagcctcctgagtatctgggatttcaggcacgcgccaacatgcctggctaattttttgtatctttagtagagacaggtttcaccatgttggccaggctggtctcaaactcctgatctcgtgatccgcccactttggcctcctaaagtgctgggactacaggcgtgagccacagtgcctggcccatttttttaacttatgaatttcaaaaacttctaatttcaaccttgtatagtctcctagctaccagactgcagcctaattgctctaaaatacactttattaatttatacatggtttacttgctaatttagaattatatctaggtagatagatatatatgtgcatacacacacaaacactcattttatatattagaaaactgacatagcagaatctctttttacctcaagactatataattcataagtaatggagctgggatttgaaccgaggtctatgtgacttcaaaattcatgcacttttactattttataatgcctccataatatgatatatattcagagtgaaaatacttgtgtaaagaattatgataaaaatgaacataaatttagcccaatattgtcttatgatagctcatgaatacatttaatattaatttgctcacaaatgatagaaatgtctaccatgaggatctgccaaatattctttgaccttttgctaaatataaatggtagagctattacctttaacataaatgtatgtcccattttcaccaacagtaacccgcacttaagcccagacagctttgtttaactctgacctctacaactcaaagataaacaagaataggattaagccttcttccctttgttgtgccccacagcaccctttgattcttgttgaattaataaatagtttgggatgaggagaaagcagaaacaagctcttctacccacttccatttccagcacaggctaataattatcaataacaagtcacagccttaactgttcctaaattccagaaatatatcatcaaagggctgtacatatatatgaagaaccctaaatctgcatttcgatatagacacctattagatttacttcttactacctacaggaaattcacgtctatgagcaaaaagtcatatacaaagattttcagaacagcataataatcaataaaaacaagaaaatggaaaaattagtgtagggatagtactagagaataattcgaagtctacaaaagattatgtttatagagtctttgtaacttttgattatgaaaaaatattgttatgttaaataataaaattaatagagtattatgagccagctattcttgtaacagctttaaacgtattaactaatttaatcctcaaaacaaattttacaaggtaagcaccattactatctgcattttacaaatgaaaaaagttcaacacagagagataggaacttgaaccaagatccttaagcttattaggtgttagagtcaagatataaatccagatacagcacttgagaagccacacttaacagtttatacagaagataaaattgtatagactattataactatttaaatatatatttgcttgcataaaaagaaaatattggatgggaatataatttgttatatgggaatttttaaaatttcttcattatatttatctttcttttccacaacttttatagtagtcatgttttatgtttataatcaggacagaacaagaagttatatttgaaaagtaaatgaaaaaaagaagttcatgttttgaacagatgccttggttcaactgagtaactgacttcaaaatttatacactatagtcacgaataatctatatttgaatacgtgctatggaaaaagaagagtttcttaacggcttaagctatgttcagagctgaaagggaccttagagattatttagaccagttttctcaaagtgtggtccccagaccagaggtgtcaacgtcatttgggaaatgcaaatttaggggccctgcccagatttactgaatcaaaagttctgggagtagcgcccagaaacctgtgttttcatgcaagtcctgcaggtgattctgatgcacactcaagtttcagaatcgctgacctaggcttatggttctcagccacggctgcatatcagaatcagtatcaccgatcccacagaaatacaaactaccatcagagaatactacaaacacctctacgcaaataaactagaaaatctagaagaaatggatacattcatcgacacatataccctcccaagactaaaccaggaagaagttgaatctctgaatagaccaataacaggctctgaaattgaggaaataatcaatagcttaccaaccaaagagtccaggaccaggtggattcacagccgaattctaccagaggtacaaggaggaactggtaccattccttctgaaactattccaatcaatagaaaaagagggaatcctccctaactcattttacgaggccagcatcatcctgataccaaagctgggcagagacacaaccaaaaaagagaattttagaccaatatccttgaagaatattgatgcaaaaatcctcagtaaaatactggcaaaccaaatccagcagcacatcaaaaagcttatccaccatgatcaagtgggcttcatccctgggatgcaaggctggttcaatatatgcaaatcaataaatgtaatccagcatataaacagaaccaacaacaaaaaccacatgattatctcaatagatgcagaaaaggcctttgacaaaattcaacaacgcttcatgctaaaaactctcaataaattaggtattgatgggacatatctcaaaataataagagctatctatgacaaacccacagccaatatcatactgaatgggcaaaaactggaagcattccctttgaaaactggcaacaagacagggatgccctctctcaccactcctattcaacatagtgttggaagttctggccagggcaattaggcaggagaaggaaataaagggtattcaattaggaaaagaggaagtcaaattgtccctgtttgcagatgacatgattgtatatttagaaaaccgcattgtctcagcccaaaatctccttaagctgataaacaacttcagcaaagtctcaggatacaaaatcaatgtacaaaaatcacaagcattcttatacaccaataacagacaaacagagagccaaatgatgagtgaactcctattcacaattgcttcaaagagaataaaatacctaggaatccaacttacaagggacgtgaaggacctcttcaaggagaactacaaaccactgctcaatgaaataaaagaggatacaaacaaatggaagaacattccatgctcatgggtaggaagaatcaatatcatgaaaacagccatactgcccaaggtaatttatagtttcaatgccatccccatcaagctgccaatgactttcttcacagaattggaaaaaactactttaaagttcatatggaaccaaaaaagagcccgcatcgccaagtcaatcttaggccaaaagaacaaagctggaggcatcatgctacctgacttcaaactatactacaaggctacagtaaccaaaacagcatggtactggtaccaaaacagagatatagatcaatggaacagaacagagccctcagaaataacgcggcatatctacaaatatctgatctttgacaaacctgaggaaaacaagcaatggggaaaggattccccatttaataaatggtgctgggaaaactggctagccatatgtagaaagctgaaactggatcccttccttacaccttatacaaaaattaattcaagatggattaaagacttaaacgttagacctaaaaccataaaaaccctagaagaaagcctaggcattaccattcaggacataggcatgggcaaggacttcatgtctaaaacaccaaaagcaatggaaacaaaagccaaaattgacaaatgggatctaattaaactcaagagcttctgcacagcaaaagaaactaccatcagagtgaacaggcaaaccagaaaatgggagaaaattttcacaacctactcatctgacaaagggctaatatccagaatctacaatgaactccaacaaatttacaagaaaaaaaacaaacaaccccatcaaaaagtgggcgaaggacatgaacagacacttctcaaaagaagacatttatgcagccaaaaaacacatgaaaaaatgctcatcatcactggccatcagagaaatgcaaatcaaaaccacaatgagataccatctcacaccagttagaatggcaatcattaaaaactcaggaaacaacaggtgctggagaggatgtggagaaacaggaacacttttacactgttggtgggactgtaaactagttcaaccattgtggaagtcagtgtggcgattcctcagggatctagaactagaaataccatttgacccagccatcccattactgggtatatacccaaaggactataaatcatgctgctataaagacacatgcacatgtatgtttattgcggctctattcacaatagcaaagacttggaaccaacccaaatgtccaacaatgatagactggattaagaaaatgtggcacatatacaccatggaatactatgcagccataaaaaatgatgagttcatgtcctttgtagggacatggatgaaattggaaatcatcattctcagtaaactatcccaagaacaaaaaaccaaacaccgcatattctcactcataggtgggaattgaacaatgagaacacatggacacaggaaggggaacatcacactctggggactgttgtggggtgggcggaggggggagggatagcattaggagatgtacctattgctaaatgaggagttaatgggtgcagcacaccagcatggcacatgtatacatatgtaactaacctgcacattgtgcacatgtaccctaaaacttaaagtataataataaaaataaataaataaataaaaattaaattaaattaaaaaaaagaaatgttctaaataaactataggggtaatcatttcaggtcaaaaaaaaaaatcacctgagagtttttaagactctcagtgtctggagtgcaccaatagagatgctgagttaactggttttaaatgagtccatcagtgtttttaactgctctttatgtgatttagccagaaccactgatttagtcctttactactcatagcatggtcctcggacccacagagttggcatctactgggagcttttgagaaatgtaggatctagagttccactccagccctgcttgaatcagaaactgcatttaaacaagatccccaagtggttgatatatacatgcaagtttgagaggcattgaacactgtcctcattatacagaggaaaaaacaaacaaggccaaaagagttaatattttcccaagatctcactgctgggggatgggagacaggggatgggagaaggggcaagaatagaagagttgaattcaaacccaagatgctcaaaatttcaactgcactctttctgttatactatgttgtaaagctttggatttgatggatctttcttttttttttttacctttctcccacctccaaatggttttcaccccataaagtacctaaagcttggtaatgcacaaatgccatgtcattccctgaagaaatttagagttggcagaggaaggcttagaaattaagtgcctgaaagccagtaaccgggctcagagatctccaaggactgctgtccagtccaaaattccatgacatctgcaatacagccttgaataaaaaccagaatgccagtatccaatgcagtgagaatttatttcatagttatcaaagcaaaccaaaggttatcagtgggttggacatttaaagattaagtacagctgatcgcactcaactcttatgcaggtagcttaactccagtggttctggtctctctctgaagggaaaatagaggtgtttatgatcctgtatcctaatgggttccaggtgatccaggctaggcagctgagttaggccctctcttctttgatttacatggcagaatccaggccatctctaaattgaaaagatatagtaatgagtaaatgcagaaaaagaaaagaggaataaaaagagctgaggcaaaacctggagtgcttttccaagtccaaagtgagctatggctgccctctctgctcagaaggtatgatcataaattactagctaatgtttagcactggggctctggcccatgatctattacagaggacaagatgcctccaagcagaaaatactgtaactggggagcaataacatctgtgtcagtcatgagactgcagttaaagtgaactgagaagttacaggctgtgctgcagatgcatagtaataatatgcacattttttagctaaaaagatatgtcatcaagatatgagttacattcttttgcgtcaccatagcctgaagaggatcagtaggacccccggatttctgttttaacattagcaagatgttagccaacaactcaagggaattatagttgataaagcaaagaagtctgaggaactcggaatatgggcttggttttctggagcacagattctaggtcgttacaatgctctgctgtactaagcaggtcacataatctctctgagcctcttaatctagcaaggtcaaagaattcattcaggatagaattgggactcaaacgcagaccttccggctataaattctattattttcccagtacttctctgtttataaaattgatatttaagtagttatcaataagagtaaatgcccagttattcaggaactgaaatgtgtacaagggactttcatttctgaatagatcaaaataaaagagaactgctttattgtaactttccattttaaaaattctttagtagcatgataatagctaaaaattcaaaccatttaaaagtgttcagggtgggagggggacaagagttgaaaaactacctattgggtactatgctcactacctgggtgatgggatccttcataccccaaacctcagtgacatgcaatttacccatataacaaacccagtgaacctaaaaggtggaaaaaataaataagaaataaaacagaagtttcaggaaaacaaactgccagttgtgggtagtctagagcaggggttctcaacccccagggccatcgactaatacgagtctgtgtgtggcctgttaggaactggaccatacagcaggaagtgagtggtgggcgagtgagcaaagcttcatctgtatttacagctactccccatcgctcgcgttaccacctgagctccacctcctgtcagatcagtggcagcattagagtctcataggagcacgaaccctattgggaactgtgcaagtgagggatctaggttgcatgctccttatgagaatctaatgcctgatgatctgaggtggggctgaggcagtgatgctagcactggggagcagctgcaaatacagattaacattagcagagaggtttgactgaacagagaccttagtaaatcaattgcttgcggactcataacaaaattatatcagtcagtggcaaatgacaattaagctgcatctggtgtcaggctttatagtggtaagtgagttgatgtactttgattgtacagctgcatctggtggcaggctttaagtcagaatctgacacttatttcagtccgtgtgtggcctgcccattattttatttaccacttccatccatgcctccttcctgcactgcgcacttgtctctgtcacagttttggtaagcccacaagctaacccaagccaaaatgagtgaaaaataaacgtcactagagagcttctttgaaaagagggaaagacccaatgatgagacagcagaagactctaagactgccaacaaaaagaaatcttcatttaaaagaaaatactaagagtcctacttaaattatggtttcattgcaccaagtgattcaccttctccaagcctgctttgtataatatgtggtgactggctatccaccgaagccatgaaaccttccaaactgctttgctacatggagatgaggcaccctgcattaaaagacaagcctttggagtttttcaaaagaaaaaaacatgaacacaaagaacagaagcaattagtgaaggccaccacttcatcaaatgtgtctgcacagagagcatcattcttagtggctaactgcattgctaaaggtaagatgcccttcactattggtgaagagttgatcctgcctgctgctaaggacatctgtcatgaattttttttttttttttttgagatggagtctcactctgttgcccaggcgggagtgcggtggtgtaatctcggctcactgcaacctccacctcccagattcaagtgattcccctgcctcagcctcccgaatagctgggactacaggcacctgccaaaacacccagctaatttttgtatttttagtggagatggggttttgccatgttggccaggctggtcttgaactcctgacctcaagtgattccgcccgcctcagcctcccaaagtgctgggactacaagagtgagccaccacgcctggcctgtcatgaacttttaggagaggctgtggttcaaaagtggcacttgttcctctttcagctagtaccaaaactagatgaattgatgaaatagcagaggctattgaggcacaattgtcagagaaaattaatgagccactgtggtacacaatccaggttgacaagtctaccagtgttgaccacaagacaacaatacttgtttgtgcgtgatttatttttcaggaggatgtgcatgaggatatgttatgttcactcttattgccaaccaacaccacagctgcagaactattcaagcctttgaatgactgcatgtcaggaaaactgaattggtcattttgggtaggtttatgcatggatgaagcagctgccatgactggatggctttctggtttcactacttgggtcaaagaggttgcttcagagtgtgagtctatgcactgtgtaatccctagagaaatgctgactagccaaaaaacgtcacctgaacttaacaatgttttgcagggtatgattaaaattatcaaccataataatgtacatgcccttaattcacatttgttcactcagctctgtgaggagatggacacagagcacacacgtcttctcttatacacagaagtgagatggctttctaaaagtagatcactggccagagtttttgagttatgagagccactgcagagatttcttttagaaaaagaatcaccactggcaacacatttcagtgacatagaatgagtcccaaaacttgcttacttttgggacatattcaacctgttcaataaaatcaacatgtcacttcaggggagaatgacaactgtattcaagttggcagataaattcgcttcattcaaagccaaactggaattataggggcaacaagtgaacattgggaactggggtctctgacatgtttcaaacattagcaaagatattgaaagagacagagccagggctgtctttctcccagctggtggatgatcacctatctcagctttcaagagtttgagcattacttcccaacacaaaagactcccaaactgggaaggaatggatctgtgactcatttgtgaatatgccaggtgaatagattttgtccatgctagaagaggatcaactgcttgagattgcatatgatggtagccttaaaagtatgtttgagaaaacttcaaatctccatagttctggattaaagtcaaggtgaaatatcctgtgattgccacaaaagcactgaaaagcctacttccgttcccagcatcctatcttagtgaagcagaattttctgcagtgacagcaaccaaaacgagattacggagcagactggacataagcaacacacttccatgtcactgtcctccatcacccccagatgggaccatccagttgcaggaatacaagctcagagctcccactgattctacattatggtgagttgcataattatgtcattatatattacaataaaaataaagtgcatgataaatgtaatgtggttgaatcatcccaaagtcatcctccctactccaccccagtctgtggaaaaattgtcttctgtgaaaccggtccctggtgacaaaaaatttggggactgctgattgagagagatcttaattgagttaaaaaagagatcacagggacacaggaaggggaacatcacactctggggactgttgtggggtggggggaggggggagggatagcattgggagatatacctaatgctagatgacgagttagtgggtgcagcgcaccagcgtggcacatgtatacatatgtaactaacctgcacaatgtgcacatgtaccctaaaacttaaagtataataataaaagaaaaaaaaagttttgcatagatggacagcctctgaggtatctttcagctttgataactggtgattccttactgtataggccaactgggcccaaagtccacttgggatttcaacaccttcttttttcatagtatgaccaggactttcccagtttatgctgtaagtcctatgatctggaactgagtcccaggcaaacaaggaatcaccatacttcttaccactatgctgtgtgtctccttgacccttgtccagaccagcacagtgctcttaactgcaccttcccacctacacaaaagcctgagtacacactacaaaaagtctttgtcccctgcactctggatcttgtgcaaacccaaaggaggctttgccttctactctcattccaacctgcatactcgggtaccttggcaagtacctaggtttgtttctctaattagccctcttgaagcaatgcttcaggtgaaccatctgcttggcttcaccaccaaacatgatcttcaagtctcccagcccaacatttctcctgccaggccttgggtcattgagcagaggtattattgggataccttatgcccctgctgctgcctagtcctgtagccactgcatagcatgatccaagatcaaagctattttgtggatttctaaatgccatactactatatcagttctgtatctattgccagaattcttttaaaaactggtcatttgtagacataagcttttcaagggctcaaatatcccattttcataaacctatttgttttcttgtctgcttagtgttgcctttgactatattgaatatcctcctcctgtgctatgttaaaatgcctttacttgttacttgttaacaataaattactcattaacaaggaattcattcttatcattgacaaatatttcagcataaatggacttctttctatagccaagagagtatgaagtatgttagattggaaagctccatatttatcgtctgttggattaaagcttgttgatttattttaaactattctaaggtggttgtttgtgtttcatacttatatctcaggagatactgatgaaactatatagaatgaatcaacaattagtacatagcccaaaaccatgtgcccaaaatacctaagttatggacattcctaaaacagaccttaatatgctgagtttttctaattaatttatatttttccacatacaaaaaggataggaaagtcttccagaaaaaaggacaatgtccttgggttactttgtagcatctaacactgctaaactggtgtagaggagtgaagaggttgaaaggaagactataagatgtcccacttaagaaactgttaaaaagtgctgtgaaagtctgatccctccattcatccacctgacagaagcactggaacaaacttctgcctgtcacagaaacttctatttgtctacccagtatttattttttttccttcttccttactaacagaatgtcaattttcttctaggcattcatttattctcccttgcagctaagggtaaccaatgaggtgtaagtagaagtgtttgaaagggccttactcacccaggagggacaatcctgggaccttctgccctccttccttcctccttctttctgcctagaatatgtcaggttgttacatttaaaaaataaaaacacagggtgcctacttaaatttaaatttcagacaaacaacaaataattggttttagtataagtacattctatgcagtttggaacatactaacactaaaaaatcatttgttgtttacctaaaattcaagtgtaactgggtatcctgtattttatctattttatcatgtccccaagaatgtggacatggagactgaagctccagcagccaccatgggacataaagagaacttacagctgaaagccacacaccaaggatgacagaaagaaaatatgggcatccagtcacagaagaccagagagggacacgctaaccccaggccatgttccttggaactttttctacatgagataaataaagctttaccttgtttgaggcatgattatttggaatttgttgcatgtcaaactcagtcctgagtggtaaactatcatttccacattgcttttcctctccactctcttccgtgtttcttttttctctccccaataacccatggtgagaattttaggtgattttattcatttataagagtgaatggaaagagtaaatcccacacaataatttgtccccctcctaaatcctcagaaacagcttaaaatgaggggaaaaatataaaaatataatctgtagttctctagaaaaaaagtgcctggaggtctcccaaaagactagcaagcaatgaagagatttccttcaaggggccaccatgaccgtatcatatttggggaggtttgtctttgaaaaggtgtacagttaggcagagagaagcttcaatgaaattctaaagagaagggaatatgatagaaaacatgcaattctattttatcactgattctatggcgctgtgtattatattactaattataatttttattgaacactaatagttattgaacatttatcaaatatcagactatcctaagcattttatatacatatacattatctaatcttcacgcttaccctataaggttgatattattagtaacttcattttgtatatatggaagccaaggctcaaaaaggaaaaaaaaaactctttcaaaatcaaaaagcatacaagatgtgcagcaggagtttgaatccacatcttctggctccacagatttggtgctactaatctgtaagtttaaaatacaatactataaaatatggtaaagatacaatacttagaaattaaggtacttaatctgtaagtttaagatacaatactgcaccatttctattttatctgatggtttaacatttcaaaaggcatttcaggactcagttcagttctttcatttgcacacacacacacacatgcacacgcatgcaggcacatacatatgtataactcctgaactggggaaaagtatacaacttcacaggtgaaaggatcaggcacatgttcaatgaattggagtcctgattcccaacatcctgcacttaagctctgcagatgaaaggatgctcagtctggcttcaattcctgtctaaaaatagctaaaagcacaatacaaaacaccagatttttgtatcaggttattgctctgagccccacttactgagtggggaatctgatgtccagaaagcagggtaacttaggaaagtgttagagctgggggaggcacacctggagaggaattaaagtttaacctaaagtgactggagcatcacgtgtttaaccttctctatccacttgctcttaccatgagtacatttccatttttaggtctcttaaaaccatagattgatgaaacaaactcacaatacagactcactttgctgccccttagctttatattccctaagaacgtccacaaactctggactggatttagcctacttggaccaagagacacaggccatgatggtgtaacatgatgaagagctctctctgaagattgctgaatcacaggaaacacacaaaccaagcaggaaaaatgtgccttgaacttttccacgtaattcacctattgcaactgggggtggctgggttttcatgaatagggcacccaaggagaatagctaataacagactgatccagaattgagaaagaatagcatggcatcttgccccagtcatgaatagatgacataacaaagagagaggaaaaagaaacaaggaacccaggagtaatggggagaccagggctcaccagccaggcgtctggtaagcaccgagtgtgggaaattttccttgcctctgagacacatattgttgtccaacaatggcatggcagctgacgttgcaaagtctccgtttcaaaggagaaaccagcagaggtgttctgctcctcctctccccttagggaaatcctggaaagtgccaaccagcttgcattattgttaaagatgttaaataaaaacacgcagcaagctctgcatgtatagtgggcagggagtggaactagtagaattttcagggccttattgcaatgtcatgtagtgaaatttaatctggactgagactccagaggatagcagaggagctgcagctcagccaccaacctaacaagcaaccttacctctcaggttctcaatgtccaaacttgtaaggcaagaaggttatattgctggattgatacatatctttattcaacaacattactgagctagagttacataagagttatctcatgtatctcacattctagtgaatttgatagacaataaaaagtaaattcataaatgtcctttagttataagggttatgaagaaaaaaaatcatagtaaacgaaagagagtaatgtgttgacactctaaataatgttgccaggaaagctgctccaaagaagcagtatttgagcagaaactaggagaagaagccagccagggaagatttggggaagcaatgtcccaggtggaaggaacagccatgtgtggccatgaaataggagcatgcttggcatgtctgaggtacatccaggaaaccaatgtggctggagttgagggagtgaggagaaagacagatggagatgagttggggtgatagcaggggacaaatcatgtaaggtgataatcagattttaggtttaattgtgatataaaaccattgaatgggtatgtattgagcagaaaggtaccatgaaccttatatggctgataaaagtagagaaagcattcaataataatttactgagcatcaatatttaccaggttttgttgcaagtgcaaggagtatatcagtaaataaaagatgtccctatcctgatagagattacatccttgtggaagaccacttgaaaaacaattgcagtggtccaagtaaaaaatgatggtgacttagtaaaaggtagtagtaatgaaagtaatgaagactagccaggttccatatttgttctgaaggtggagcaaaaagaatttgttgatagattagatgtggggataagaaaataaataaatgattcccagattcctccatctctctcttttttttaaactagatccttctcgtcattctaactttggttcagatattacctcttcagagaggcatccccagataacacaagtttacaatgccaagttaactcattactctcttcttttactactgttgtgccatttgctgaaatgaggaagacttggggaggagcacagtctgatttggagtcagtatttgaagatgttaagtttaagatgcctattagacatccaagagaagatgatgtatatgctagtttgacatatagcttggaggacagatgaaaagttagtatgaacataaaaagtttgtttatcacctaagaaagacatgcatatactaaagagaaccaagtacttcctagagtgttccaaaaattagagatcaggaaggggagaggtagcaagtgagttaagaaaagaaggtgaacatgacgtcccagaaaccatgtgaggaaaatattccaggaggaaaacatcagcttcctcaactgcttgggacttgagtatatattaaaacgaaccattgggttcaaaaacatggaggccattggtgatattgagtggttccagtggacttatggggacaaaatcaaagtgggttaaaaagaaaatgggagttgaggaattgagacagtgagtttagatgtctccttcatggaatttgatcataaaagggagtagaaaaatgagcaacaattaccaagaggagaatgttagattgtttgtttgtttttaaggtgagagttgcaatataaaaaaccaactgtaaaaaagagcttttttatacaatcatgaaaatttgaatgaagactgataaaaaagatattaagaaataattattaatttgctaaaaatgataatggaattggagttacagtttttaaaattccatgtgaagtatgtattactaaataagataatatctggggtttgctataacatatataagcaagacaagtttgggggagacagatgaaactagattggcaaaatatcattgttgaagttggatgatgagtatatggaattcattatatttgtctctctacttttgtgtatatgtaaaaagtttcttgaaaatgataagagccggtcatattacggcagtacactattcccataatggcccaggtgccccacctcttcctggtagggtggagccagaagaggctgagtgagaagccaggacttttaccacctcccagggatagtgagcccctcctctccctcagtgtcagtggagggcatgcagacaccagtaatgaggggcccctaccccctgccagccaggcggtgccagcagaagcctgatgtggagcctgccccccatccaccccaggagtaacaaagcacccccacaagtgtcactaaaggctgtgggggagctggactttcaccctcacttggcagttacaggcaaggccccttccccttggcgatgtgaaaccagaggagccctaaatcaggagatttaaataagatccagagtctcataatatccaaaatgtccaagatgtaaatgaaaatcactcatcataccaagaacaaggaaaatctcaatttgaatgagaaaagacaatcaacagagatgacacagacgttgaaatcatctgatgagaatcttaaagcagccatcataaaaaggcttcgaagagcaattatgaatacacttgagacaaatgaaaaaaataagtctcaaataatatgtacaaacacagcaggtttcaaaaatgagcttgcagaaaattactgtcttccacattgttcatattgagaaaccacgtgtctcagagtcgagaggtttgaattaacgttggtccacagctggtctggtgcatcactatccctggggtcccagctattttaacacatcacatatttcccaaaactcaggctacatttcagcaattccacagcctactgcatcactgaatgtttttccagcctgcttcctgaaaaggaggtttaggattacagcatatcatttaggtaacaatgttgtatcccaagactagctcccaaaggctaagatttcacaaatttcaaaatttcttctgaaatttcatcatccttctaccttctcaggagttgtaaacttggaaaaaaacttattataaaaggtcagttggaacacactctagggagttaacaaaaatgaattgttgtgctaatattccaaccatttaggaaaacttctgaatgcctcttatcagtgtaacatccatcaaaacaaggtggacacctgggtgctctgcagccatccgaggcggctctgtgaagaccttggccttggggtggttgggccagctgcagtggaacatgagcagggccagtcccatgccatgggaaagaagaggcttctgcctataaaagaggcctttcagctggcccagccaccccaccagaaccaggcaaagctgctagtggcattaagctgcatctaccacacaaaatgcaacaagaaaacacactccttctctcggccgcatccagtactgttcctcacagtcagctacagctatcacatatttcattttgtggatatattaaatacctaggtttatatggtcaatcccctattggtggacacttctacttgtgtggtttctagtctttggatattaggaaaaaatgcttcaatgaaaacatgttatttagttttttaccttcttctgtaaagtattctggaaattttgtcattttttattagtattcgtagtaggtgtatcatttaaaaatttgctggactgaaagccttaaaaaagataaaagtgtgggcaaggatgtggcgaaaagggaacccttgaacactgttggtgggaatgtgaattagcacagccactgtggaaaacagtatggagggttcctcagaaaattaaaacttgaactaccataggatccagcaatctcactaccagatatatatccaaagggaatgaaatcagtatgtggaaaagatatccacattcccacatttattgcagcattattgacaacagccaagatatggaatcaacttatgtgtctattagctgatgaatgaatttttaaaatgtagtatatatacaatgggatactatttagcctttaaaaagaacaaaattctgtcatttgtaacaacatggatgaacttgaaagacattatgttaagtgtaacaagccaggcagagaaagacaaaagccacatgatgtcatttgtatgtggactctaaaaaagctgacctcatagaaatagagagcagaatggtggttatgagagactaggttgggggtggatggagatgttggccaaaggatacagaatttcaattagattggagaaataagtttgagagatctattatacaacatagtgaccatagttaataacaattgcacacatgaaaagcgctaagagaatacattttgtcttctcatcacaaaaaaaagtgaagttatgcatatgttaaatagcttgatttagccattccacaatgtatacatacatcaaaacattgttatacaccataaatatgcacaatcttaacttgtcaattcaaataaataaaatttaaaatcaaaaaagaaagaaagccttaaaagcttatataatttagaggaaacaaaaaaacagaacgagttttaaaatatagtgtttcctgagaaaggggtgagttgaacaggcaaggaggggcctgctctcatgatggacctccagaatcccagctgcaggagacccaaagactcccatggacacttgagctggtagggagagctgcttagaaagggggtaggggcaggactccagtctatgtggcacccagagggtttggcatagaaacagctacagtggagcatggctggggatgcccatctcccaaaactctccatgctcctttaggtggccttggcctttaatgagtgccagacctgaatagagcaaggtggtcttgcccatgagatgagggccagtccaatctgagcaacccctatctgctggtctcttctggggccccagcttgctgcacccatttgcagcacagcctctgatgcccaaccagggtaactaccaggggccatcatcatagctcctttactagcagaccacacctgaccttaggagagatctagcacaccagcccccactgcggagcaaccacccacccacagcctattcaataaatggtgctgggataactggctagccatatgcagaagactgaaacccctaaaaacaaacctccgtgggaagcagtgccaaggtagggaaacctgaacatcactgatgagtggctggaggcccagagccaacgagccccagagattaaaaactggggggcactcagtcatcagggcctccgtgcttttgtgaatttgcctccaggagcaggaccagtttctcacagtgaatactggaggaaaatctcctcatacttcctgcaggaagaagggaaaaggaaacatttttaaagatgccagagcactcagttcttaataaggtccacccctcaggagaaaccgtttaacagagcttaacagacctgagggaagagaaataatccaactccagccagctctgccttccatgtggaagaagggaaatacccaactctagtccactccagccattgtatcccacctaagtggtgggaagaactgagaaacatgtgtgaagttcacagtccagaagtataggccaaaaaaacaaataaacaaagaaaacccagttctggttccaaaatggtggtgtattgatgagagtgttaaatttctaatttttaagactcttaggcaactatgggtttcttttgttttcgttttttattcatttgaacacttttcaagtttttcaaaactagtcaatttgaattttgacagctattcaatgtgttatctccaagttaagaaaagttgttttccatacctccctattcctaggatgcaagtttttcattctggtaactataccaaggagtaattataaaattgagttcttttaccatattttgtattccggaccacttactggtaaatgtaaacaagcaaaagaaattaactcagataatatgaccctgctaaattgtatacatatttataaacagcacatttgtgtattttagctgtgtcagtagccaccccctccccacgttcattcccatttttcttttttttttttttttgagatggagtctcgctctgtcaccaaggctggagtgcaatggtaccacctcggctcactgcaacctccacatcctgggttctagcgattcttctgcctcaacctcccgagtagctgggattacaggcacgcctgccaccatgcccggctaatttttgtatttttactagagacaggggtttcaccatgtttgccaggctggtcttgaaccctgacctcaggtgatccaccctccttggcttcccgaagtgctgggattacaggcatgagccaccgcgcccggccttcgttcctatttttctatagttacgaatgctacatagatgtgactactctttaacatcagaaaagaatacacagagtaagagtcttccagccaaaacaatacattaaatactgatggaatcaagtattttgtataaagttttcatttgttttctctaactctatgctttttgttttgtatgtagtatgtatttcatatgcatacactttttgtatagagtaatcaagttggataatttgttggtaaaaataataccatattggctgggcgtggtggctcacacctgtaatcccagcactttgagaggccaaggcaggcagttcacttgaggtcagccctcaagaccagcctgggaaacatggtaaaaacccatctctactaaaaatagtggtggcacacacctgtaatcccagctactcaggaggctgaggccagagaatcacttgaacccaggaggcagatgttgcagtgagctgagatggcgcccctgaactccagcctgggtgacagaggaagattccctctcaaaaaaaaaaaaagtcacattgaatgatattgctatagacacagcttgaggtttatatctatttttgctcattttctaagaatatatctaaaacaaacattaaaacactctacatctttctaagtcagttcttggaaccgaaatgtggagtctatatttaggaaccaacaggcaaaggaaaactctaaagcacaaaaatgacattctaaagatgcaggtttcatttctgttttaaatgcttcacattactattcctctctctcttttagtgtaaaaactaaggttgggagtgatgttgtcaagttcaaagaaaggcctgaaggtcattgatggattgaggtagatagccaggtgtgggtttttttgtttggtttggttttgggtttatttttagcctgttgcccaggctagagtgaagtagtgcaatcacagttcactgagattgccaggtttgataaataggaatctgtaggatggtgatctagagcagacttgactctattttacctggaaaagtttctaaaactctaaactagttaactttgactaagcataaaacacactgcactggtgtttatatttttcatgccacaatattaaaatataattttaaatgtacattattataatccataaaagatttgcatacatgtattaggcttccgatatgatttggctctgtgtccccacccaaatctcatgttgaattgtaatccctaatgttgggggaaggacctggtagaaggtgattcgatcatggggacagatatccccttgctgttctcacgatagtgagtgagttctcacaagatctggttgttttaaagtgtgtagcacttcccccttctctctcttcctcctgctcccacaatgtaaggtgtgctggcttccccttcgccttttgctatgattatgagattgctgaggcttctccagccatgcctcctgtacagcctgcagaactgtgagtcaattaaacctcttttctttataagtcaccagtctcaggtagttctttatagcggtgtgagaacagactaatacagcttttaagtctttactggaaattatgcaaatagtggttgtaaaaagactgttttaaatagttttttactgttctagttttcagtttttatagaatattataatattctattataatagaacattataattaatagaactatttataattcactatatagtgaattataattatatatataattcactatatagtgaattataattatatttataatatatttataaatagaacaatttataattcactatatagtgaattataattatatttataatataatatatttataaatagttatataattatatataattataaatataaaatttatatatataattatatataattatatataatatatattaccatgtatatatatatttatttttatatattattataataatatataatatatattatatattattataatatataatatattatatatattatataatataatatataatataaaataaaatataatatataatatataatatatataatacatataatatataaaatatatattgtatatatttataaatatatatattatatttataattatatatataaatatatattatttttataaatatatataaatatatattatatttatgaatatatttataattatgtttataattatataattataatcatataattatatttataattatataattataaaattataaaaattcactatttataattgtgaatttttccatgtgggtataggtatagtgtaaattgtagtaatataataaaacacatcaattgtgtttatgtttgcctttcatttatgtgtagcataaaccatcttcctatatatgtgttgccaaactattcgccaattgtgtttatgtttgcctttcatttatgtgtagcataaaccatcttcctatatatgtgttgccaaactattcgccaacatctatttggtgaaatatgctgaaaatcattctgattttccataagtatagttcttaagttccttatatatccagaagtaaacgctatcctgctgtacatcaactgttcatttgttacttatcttcgtatttcttaagagattcaaagtcttgttcatttttctgggggaaaaatccattttggagggaccagtttttgttctttgtattctgtaatgtgaacttttcctgtgtaccaacattttaaaaataattacttcaaagaattattggcacataatctaaagacagacactatttttttaagtaaaatttgatttttttaaggatctttgcacagaatgagtaggcctatgctaattcttcaaacaggaaatgtagtttcctttctaagaatggatgcagattcagtttcatggtaatatgataataagaaaatgcttctattttccattagcacgttcgtggtttcatatacccatgtctataaaacgtgacatgagactttggttgggctatattttattgtatttattagacttgcttatatgaatgacttaagcagaaataaagtcatgtatttacaaggtgaacaagccaaattgtgatggcctgtctgttgcttttggcatctgggatgagaccaactgactcttccattggttgtgagatagttgaaatggtccattggtggtcgtacttagtgttctgtgaaatcagggagtccttccaccccaagaatgactcatctgccattggattccagtacaaaagttagcagccttgtgtgtcccaaattgatttaatttctacttaacgtgctcctgtgtacattcattttataatttaccaaaatagtatttgggtaaataatgactcctggagcaagctgatgtaattgctgctttggccattgttttaaatgtatgtattagagtaactgtaagagactaaaatcacaaatctcagtgttcaaaatatcattctaataaaatacatgcattaaacacttttttaaaattttaaaacaaaatggtggtatagaagcaagttggcttcactctccccaacaaagaaacaaaaatgaatacacagtgatgagattatcaccaatattatcccagaactcaaatacaagaatgagacaattactggggccattcagatgtgaaaatactccaagcagacagtaaaagaatgagacttcaatatccatgatacccctccctcagtgtacccagcaccaagcatacagaaattttttactccaaatcatagtttctacactagaaaatgtgagatcgaggttaacaaccaactttcccaccatcttgggttccctggcaggataccctgcctcaacccacaataaacaccagcagtgcctgaagggaaaaatattcctgaagatagccagagacaaaagggagaagtgaaactaccttcccagccctggaaatgctgctctgtaactcatgcaaaggagatgacaaatcagagtggctgttcagcagcaccacactgtaggaggttcattccacaagtcccctgggcacaaacacctagccagccttcccacactactaggaaatcccgttttggaacactcccatttgggacagatggcactctgatcatttactagaaccaaagcaaaactgagcttaacatgtcatctagtcccaaaaacgaggcagcaacatagtggtgggggcagggagaaacaaaatcaacagataaattatgaagaatctctaagcaaacacatccagtaaaaatcaaacaagccagacagagaagcgtgaattaaataattaattcttcaacgcaaagacataaacatacatctacaaacaacagcagagaaccatgactgcctcaaaccaacaacacaaggcaccactgactgacccaaacaagacagcaatatgtaaactttctgaactataattcaaaatagcagtttttttcaaaaacttaatgacctccaagataacacagaaaagcaattcagaaatgtatcaaagagactgaaataatgttttaaaatcaagcagaaatcttggaactgagctatatgttagctgaactaaaacattcattagaggctatcaacagtagaatggataaacctaagctcactagagcaagaactagcaagctcaaagacaggatatttgaaaatacacagtcatagaaggaaaaagaaaaaagaatgaaaagaaatgaagaatgcctataagatatagaaaattacctcaaaataccaaatctaagaatcactggtgttcaagagggatctgagaaagaacaaggggtagaaagatgattcaaagaaatcataacagaaaacttttcaaacttaagaaaaagataaatgtccaagtacaggaaggtcagagaacaccaaaaagattagacctaactaagactaccccaaggcatataataatcaaacgctcaaaagccaatgacaaagagagaatcctaaaagctgcaagagaaagtaaattcatataaaggagctctaactcgtctagcaacagacttttttttttttttttttttttttttttttactttccataagcaaaaaagtttaatgacttggtctgaattttttttttttattattatactttaagttttagggtacatgtgcacaatgtgcaggttagttacatatgtatacatgtgccatgctggtgcgctgcacccactaactcgtcatctagcattaggtatatctcccaatgctatccctcccccctccctgcaccccacaacagtccccagagtgtgatgctccccttcctgtgtccatgtgttctcattgttcaattcccacctatgagtgagaatatgcggtgtttggttttttgttcttgcaacagtttactgagaatgatgatttccaatttcatccatgtccctacaaaggacatgaactcatcactttttatggctgcatagtattccatggtgtatatgtgccacattttcttaacccagtctatcattgttggacatttgggttggttccaagtctttgctattgtgaataatgccgcaataaacatacatgtgcatgtgtctttatagcagcatgatttatagtcctttaggtatatacccagtaatgggcaaggacttcatgtctaaaacaccaaaagcaatggaaacaaaagccaaaattgacaaatgggatctaattaaactcaagagcttctgcacagcaaaagaaactaccatcagagcgaacaggaaacctacaaaatgggagaaaatttttgcaacctactcatctgacaaagggctaatatccagaatctacaatgaactcaaacaaatttacaagaaaaaaacaaacaaccccatcaaaaagtgggtgaaggacatgaacagacacttctcaaaagaagacatttatgcagccaaaaaacacatgaaaaaatgctcaccatcactggccatcagagaaatgcaaatcaaaaccacaatgagatatcatctcacaccagttagaatggcaatcattaaaaagtcaggaaacaacaggtgctggagaggatgtggagaaataggaacacttttacactgttggtgggactgtaaactagttcaactattgtggaagtcagtgtggcgattcctcagggatctagaactagaaataccatttgacccagcaacagacttttcaatggaaaccatacagtctaggaggtaatggtgtgacatttccaaagtattgagaggaaaaaaactaccatccaagaacactttgtccagcaaagctgtccttcaaatatataaagagagagagattaaagtcccagacaaacaaaaaactaagataatttaccaccaccagatccagcttacaagatgctaaggggagctcttcaaactgaaagaaaagaaccactaatgtgcaaaaagaaacatttgaaaatataaaactcactagtaaaattaagtacatgaacaaacaaaaaaaatctaatactgtaactgtgatgcgcaatccattcataactctagtatgaagcccaacagacaaatttatcaaaaacaataatagctatactggcctattaggagataagtcatataacaatatgtaaattgagacaacataaagttaaaatgtggggaaagtagaattaaagggtagaggtttttttcttcgtttttctttgtaatctaagataagtagtctttaaaataacttgttatatctataagaagttttttgtaagcctcacgataaccactatgattttaaaaaacctataatagatttactaaaaataaaaaagcaatgaattcaaacacactaccaaagagaatcacttaaccacaaaggaggacaggaacaaagaaagagaagagttacaagacaaccagaaaacaagttttgaaaaatggcagtagtaagtccttacatatcagtaataacactgaatgtaaatggactcaattgttcagttaaaaggcacacggtggctgaatggataaagaaaaagacccaattacatactgcttattttaactacataaaaatccactttcattatacagacacagactgaaagttaagtggtggaaaatgatatttcatgcaactggaaaccaaaagagagcaggaatcactatacttatatcagataaaatagattaaaaatcaaagactataagaagtggcaaagaaggtcactatataatgatatagggattaattcagcaagaagctataataattataagtgtctatgcactcaacaccagaggtcccaagtataagaagcaaaccttaatagatctaaacctactaatattgtattagactgtaatacaatattagtaggggacttcaacaccctactctcagtaatggacagatcatccagacagaaaatcaacaaagaaactacacactaaaccaaataggcctaaatgacatttacagaacatttcaaccaacagttgtagaacatattcttttcatcaacacatggaatattcccccaacacatggaatattccccccaacacatggaatattccccccaacagattatatcttaggccacaaaacaatcaagtatctcttctgactacagtggaataaaactagagatcaatgacaaaagaaacctcagaaaatacataaacacatggaaattaaacattttcctgaatgaacaataggtcaatgaagaaattaagacgaaaattaaaacatttcttgaaacaaatggaaatagatatacaacataccaaaatctatggaatacagcaaaagcagtactacaaggaaagtttatagcaaaaatgctccatatccaaaaggtagaaagacttcaaataaatgacctaatgatgcacctcaaggaactaaaaaagcaagaacaaaccaaacccaaaattagtaaaggaactaaataataaagatcaaaacataaataaatgaaacaaaaaaatagaagaccaacaaaatgaaaagttggttttctgaaaagatgaacaaaatcaacaaacctttaactagactaaccaagaaaaagagagagaagactcaaatagaattagaaacagagaaggatgcataacaactgagaccacacaaatacaaagaatcgttagagactattatgaacaactatacaccaatgaattagaaaacctagaggaaattgataaatttctggaaacatgcaacctaccaagattgaaatatgaagaaatagaaaactttaataaacttgtaacaagtaacaagattcaagtcacactaaaaggtctcccatcaaagaacagcccaagccctaggcacggtggctcacgtgtatactcctagtactttgggaagctaaggcagatggactgcttgaagccaggtatttgagaccagcctgggaaacacagcaagacctcatctccacaaaagttttaaaattgttttaaaggtgtagtggcacacccctgtactccaagctactccagaagctgaggcaggaggacagcttgagtccaggagtttgaggttgtagtgagctatgatcatatcactgcactctagcctgggcaacagagtgacatcttgtctaaaaaactaaaataaaagcccagcacctgacggctttacttaaagaattaatgcaaagtctactcaaactcttttaaaaaatatgaaaaggagagaatacttccaaactcattggacaagccagcatcaccttgataccaaaaccagaaatggacacaacaacaacaacaacaacaaaaccacaggctaatgtcactgattaacatagatgcaaagctcctcaacaatatactagcaaactgaattccacagcacattaaaaagatcattcaccatgatcaagtgggatttaatcccaaggatgcaaaaaatgattcaacatatgcaacaaatgtgatacatcacataaaaccaataagaaaggttatatggtcatttcaatagatgctggaaagacatttggtgaaattcaaaattcttttatgataaaaaccctcaacaaattggatatagaagaaacatacctcaacataataaatgccatatatgacaaacccaaagctaatatcatatgaatgggagaaaattgaaagtctttggtttaagatctggaacaagacaaggatgatcactttcaccatttattcaacataatactggaagtcctggccagagcaattagtcaagagaaagaaataaaaggcatccaaattggaaaggaagaagtcaaagtagctcgtttgcagacaatataatcttatacttagaaaactcctaagatttcaccaaaaaacagttagaactgatacattcagtgaagttgcaggatacaaaatcaacatacaaaaattagtagcatttctatacattaataatgaactagctaatcaagaacacaatcccatttataatagctacaaagaatacaattacttaagaatccatttaatcaaagaaatgaaagatctatacaagaaaaactataaaaccctgatgaaaaaatagaagaggacacaaaaaaatggaaaggtattctattctcctgaattggaagaatattgttaaaatgacaatactacccgaagcaatttacagattcaatgcaatccctataaaaagaccaatgacagaaacaatcagtcttggctggcaagatggccaaataggaacagctccggtctgcagctcccagcgagatcgacgcagaaggtgggtgatttctgcatttccaactgaggtacctggttcatctcactgggactggttggacagtgggtgcagcccacggagggcaagccgaagcagggtggggcattgtctcacctgggaagcacaaggggtcagggagttcctgcccctagccaagggaagtcatgagggactatgacgtgaggaacagtgcactccagcccagatactgcacttttcccatgatcttcacaacgcgcagaccaggagatcccctccaatacttaacgccaccagggagggccctgggtttcaagcacaaaactgggcagccatttgggcagacatcgagctagctgcaggagttttttttttttttttttttttccttcatgccccagtggtgcctggaatgtcagcgagacagaaccgttctttcccctgaaaagggggctgaagccagggagccaagtggtctggctcagcgagtcccttctccatggagcccatcaagctaagatctacaggcttgaaattctcgctgccagcacagcagtctgaggttgacctgggatgctcaagcgtggtggggggaggggcatccaccattgctgaggcttgagtaggcggttttaccctcacagtgtaaaagccgccaggaagttcaaactgggcagagcccaccacagctcagcaatgccgctgtggccagactccctctctagattcctcctctcttggcagggcatctctgaaaaaaaggcagcagctcagttaggggcttatagataaaacccccatctccctgggagaaggggcagctgtgggcgcagcttcagctgacttaaacatccctgcctgatggctcagaagagagcagcagatctaccagcacagcgttcaaactctgctaagggtcaagctgcctcctcagtgggtccctgacccctgtgtatcctgactgggagacacctcccagtacgggccgagagacacctcatacaggagagctctcactggcatctggcgggtgcccctctgggacgaagcttccagaggaagaaacaggcagcaatctttgccgttctgcagcctccgctggtgttacccaggcaaacagggtgtgaagtggacctccagcaaactccagcatacctgcagcagaggggcctaactgttagacggaaaactaacaaacagaaaggaataacatcaacatcaataaaaaggacgtccactcagagaccccatccgaaggtcaccaacatcaaaggccaaaggtagataaattcacaaagatggggagaaaccagcacaaaaaggctgaaaattccaaaaaccagaacacctcttctcctccaaaggatcacaactcctcgccagcaagagaacaaaactggacggatgatgagtttgacgaattgacagaagtaggcttcagacggtgggtaataacaaactcctctgagctaaaggagcctacatctactgatatgatcgtatgatttttcttctttaatcctgataaaggactgttattcaaaatacacaaggactctcaaaactcaacaataagaacacaaacagcccaattaaaaagtgagctgaataccttaacagacaccttacaagacaagatattcagattgcaaataagcatatgaaaaaatcctccacatcatacgttaccaaggaaattcaagttaaaacaatgaggtactactataaacctattagaatgaccaaaatccagaacactgacttctccacatgctggctaagatgtggagcaacaggaactctattcgctgctattgggaatgaaaaatgatacagccactttggaaaatagttgggaagtttcttacaaaactaaatatactcttactatatgatccagcagtcatgctccttgttatttacccaaagcagtttaaaacttaatgtccttacaaaaatctgcatggacctattttcctccattatcactggttttattttcctccattatatcacacagccctacagatgtcttcttcaggaaggagcaggttggctaacaaaaatcttcacctgttatcactctgtggatgtttatcttttaatagggcaatattcaaaagactaaatcactaatgttgaacttttaggtaccaaaatcagctgttgggagttatttggcagagggaaacctgcttagcatctaaatagcactggcagttgaccacctacctcacgtatttattacatcagcccagtcaagatctactgctatacatgggaactaccatgctatggtttgagtgactgggctttggacactcaaaatttctagcctggaagatatcccttagttctcattctactaacaagagtcctacagagagcattttgagacatttattgtgaaaccatatattcttatatgtcagtcaactgctgttatttctaacacgcagcttttcctccagttcaaattacagttcatatatgagcatggtgttctttgatcttaaaatgtttcactgcttgttaatgactacatagatgatgttccctttggaaagaataacaataaggtaagcaagattacctagtgaacagaaaattggaattcagggaccctgcctaaaagcacttgggatccaactatgtagaaaatcagccaccagccatcctggagaagatgtaataaagataacaaaaagaaaaatattgccttatattttcatagaactatatcagacacctcatatgtacactcctaaacctcagctgtgtgtggtacctgaactatttgttctgcctcagctttggaggaaactaggcaggttctactcagaggcacccctttgggtttcagactcatcatctctccaatacggacattcttttcagaagcagcgattagcataccactgggctcttgtcaaaactaaacagctgattgaggggcttcaagatagttgactggaggcatctggtactcatctcctatacaaaaaaagagccaaaatagggggtagataatcacactttgaatggatcacctaagagagaacactggaattcaacagagaagtgacaggaaacatctaaagcgaggaagaaaagggaagtgaggcagcctgctcagtaggttgggagccaggagaggccccagtgtgaagaaagagtaaatgaatgaccccaagcagtgcacatactcaccgctaattctttcatcctagccaagaaaaaccctagactcttgcaagcaccacaaataacagaatgtcctggagaccacatgaaggcatagctccagagagggggctcatgctgggtcctacacagctcctgagctctagacaggtacagcaaggtgtcccaatgaaaacccaggctccctgagactgcatcctgcccagggaaccaacagtccttgcatctccacatctctggagccccagtgagatgcccctcctgtagccacgccccaatgagatgcccctgctgtagccaccaccatgtctggcttctgcttcaagggctgaaacacaagccactggcaaacacctcactggccccaacagtgaagccatagtgtattttcacacacccccaggagaaactccccataaacagctgctgccactgtgggctgccacagcctggggctgaagaccaagtgaagtacatgctccccagcaccctgcacatatctgctaccattaaaagcaaccccgccctctccaatagcagggctgcagtgcagcaactgctgccttcacccaagcattctgccttgggcctggggttaccctgccactgcctaacacagccaatgcctgcaagcaccaccagggtccctgaggacagatacacctgacccagatctaccccaccagtcctcaagttttccatccaggggcctggaaaccacccagcccagtccaccactattggtacctgaacactctacccagggtcctgagatgaagcacatccaaatgccactacccccacagcagacacccgctcacatgttccacttgcaattagaagaaagaagttctcatgtctgagagcagagtagggtgactatagtgaacaacaatgtattatatatttcaaaattgctagaagataagacttgaaatgcccccaacaatagcaatgataaatattcaagatgatggacaccttaaataccctgaattgaccattacacaatttgtacatgtaacaaactatcacatgtacccataaatatgtataaatatttgtaccaatgtggaaaaaaaactgaatggctgacccatacggccttgtaactctccggcctgatgtccctattttgggatgggtcgatgaggacttgagaactaatatgttgggaagggcccaaaaggcatcaccagccaagtggaatggtacactcaagagcacagcctgcctgaccctggcaatatctcagctttatgcaaaaatgtggctgccacccctttggggagactctgttccccactctgccacctgaagcaaagttgctggctcagtgaggaccctcacctgtcagaggttcccctttatgcccacgactaatttactgattattcagctaagctgattgctaatgttgccactgggcagaagcagctttctgatcctaggaacaacgctgaaagaatgtctatagcaagagccaatcagtaccatggtctgcattgaaagccataacccttaccttagacaacactccttcagaccaggtattttatatttttactgacttggatttttgccaatggccttgcaaccagatttggcacttggaagaaagatcacagattagttaaagaaaatactctttgggctgcgaactgtgggaacaagttgtaactgtcagtctgatagtctgggtcaattatgtgtttccccatgataaggacctatcctccgatgagactgactggaaccaaacctgtaccactcagatggacaccactgccacttggatccatcattgcacgggacatgacaaggcatctactattataaactgggcacaaaataaagcttctgatacagaagccatgattgcatatcaagcttttgactcatgccaaaaactagcccatttgtctcatgatgaagaagcccgcaatgtaagaggtattgcccccattcgcacctggcacattgaccatttcagatgtttgagctcctcttgggctactggtggagtctcagtgatgttgacacttactcagcgtacagtgttactattttagttcaataagctgaacctagccgcacactgtggctcttgtaactcagctgtgtcaggtttctggctttctggactgtttatagtctaaatatagttcacctttgtcacaaagacattcaacaatgggccgatagtcaaggtattcaatgcacatttcacaccccttttcatcatttagaggtggaatgcacttatttaaaaaatcaactcaaaatgattttttactctctttctttcgcttcctcctttggtcactgaaagcagtcatccctcaaaggggcttatctcctttcacctacctccttattaatgatcaagaataaaaggaatgggtgtgttatataagcatattttgaaatttggaatttctcttgaccattctggcgcataatgtttccttctttcccctaacaataacctaggccagcctgtgtaatatacactgtgcatggcagcctggctgaaagggatcctaaagaattcaaacttaattcaggttaagcctcctagattcccttactgggctgatatagttctagatcaaaaagatttaggttggatgtgagatgacttcttgaattagtacactactcaccaagtccctctccagtggtccatgaggaccaagggaagaggataaaataagtcctttataaattttacaaaaataccatgtccctcttgtacctggccactccagacacatgacctacttgtaagtaggagatgattgtggaaaaggtgaagttagcactactagaatgggatgcacggattatgtcatggtgagaggagagtaaaacccctggagggaatactttagatcccaggagttatggaaggaggaggataattattttcagtctttcagagccatccctggggacttcttcaccagatatagcaggaagctgacctgcatagtggtctcctcccaagatttaagatgattagtggggcacactccatgtgacttcaactcatcagaagcacactaccatcaccaccactcaacctgaggaagagataaggaaaatcagaacatgcacttgtctgtttggctctttgtggcaaactaaccctactggtttgcacatggaagaggccaaaaaggtggcactctcctgccaaaagaaggagggaagactgtgggaaaagggtgcactctttcatcccagaaatactgagaggcagatgtcttagaaagatgtcttataggaagagaggcagactctttctataaaagaggtccccttttatagaaacataaggagggcagatagtttacatcccttgcccacctcccattgcccttacagagtactattaaagagattttattttctaagagcttagaaaggaggtcagaacaagagtatatcaacagagagctatgatgttaaaatatattcttcatattaaacattacattcatgtcaaggggtgagaacgttcagtgacaagtgcatgaaaactgtacttatggtcaatgaagatacttctttaggagaagccaggcgacgattctggttgggaagcaatagataaggaacagttcaaaatgaccagtgaaaatctttaggcattaaggatccagtcactgatctaaagtaaggcttctctaaggcttaaggattagagtatctttaggaaaagcaacttatgtaaaagatgtctcaaagaacagaataatggtccataaatattagaagatagaagtcctaaaacaactaagagtaccataataaaaagaaaataggctttgctaaaaatgaattcaatcccagatctcataatctaattaaaatacatagagtggctggatagattttttaaaaaccaactatatgtggcctacaagagactcatctcacttgtaaggacacacatagactgaaagcaaagagatggaaaaagatagtccaagcaagtgcaaaccaaaagagcaggagtagctaaacttatatcagataaaacagactttaagtcaaatggtaaaatgagataaagaatgtcattatataatgataaaggggtcaattcgtcaagagctataacaattataaatatatatatatatacatatatgtattcaacatcagtatacctaagtatataaggcaaatattaatagatctaaagggaggaataaattacgagaaaataatagcagaagactgcaaaaccccactttcagcaacgaacagatcaagatagaaaatcaataaggaaacactgaatttaaactacatattagaccaaatggacctaacagacatataaaatattccatccaaaagcagcagcatacacactcttctcaagtgcacacagaacattctccataacaaatcatattttaggccacaaatcaagtcttaacaactttaagaagattgaaatcatattgagtgtcttttctaaccataatggtataaaactagaaatcaataacagaagaaatttcagaaaattcacaaatacatggaaattaaacatgttcctgagcattcaatggattaaagaagaaattaaaagggaaatttaaaaaatatcttgagacaaataaaaatgaaacacaacatactaaaacaagggatgcacctaacgtgttctaggaggaaaaacacctagaccataaaagaagaaaaatctcaaatgaacaacctaccattacacctcaaggaactaggcaaagaagaacacactaagcgcaaagttaagaaataaatgttagagtagaaataaatgaaagactaggaaaacaatacaaaagattagtaagagttgattttgaagagacaaaattgacacccctttaattagactaagaaaaaagattcaaataaaataaaaaatgaaataggagatattacaaattgtgtaacagaaatacaaaggatcaaaacagactactgcgaacaattatacaccaagaaattggataacctagaaaagaatgaatacattcctagacatatacatttcttaagactaaatcatgaaaaaatagaaaatctgaacagcccaataatgagcaaacatattgaatcaataataaaaattctcatatcaaagagaagcccagaatctgatgaccactgcttaattctaccaagcatttaaagaaaaactggccgtatacaatggcttgtgactcatgcctttaatcccagcactttgggaggcagagatgggagcatcacttgaggccagacgtttgagaccagcctggcaacatagcaatttttagcaaagcctgttttttttttttttttgcgtgtctaaaaaaaaaaaacattttattaaaattcactgagcatgctggcatacacctatagttctagctattcagaaggctgaggcagaaggatcatttgagcccacgagtttgaggctgcagtaagctataatcatgccactgcactccagcctgggaaacaaagcaagatcctatatttaaaaattaataataataaaataaaatgaaaataaaaagttaagaagaactaataccaatccatctcacgtccttccaaaaaatttaagaagaaagaatacttccaaagtcattttataaggctaacatcaaccagataccaaagctagacgaggatcgacaagaaaagaaaattataggctaacatccctcatgaacataaaagcaaaaattatcaacaaaatactagaaaactgaattcaatagcatattaaaataatcattcatcatgatcaagcagaatttattccagggatgaaaggatggctcaacatatgcaaatctataaataaaatataccacattaacagaatgaaagacaaaaaccacatgatcatctcaatatatgcagaaacagcatttgataaaattcaacatcctttcatgataaattcttaataatttaggtatagaaggaatatacctcaacacaataaatgtcatatgtgacaaatccacagctaaaatcatactcgatggtaaacattgaaagattttcctccaagatcaggaacaagacaatgatgccagctctcaccactcctattttatagtactggaagttctagctagaggaattaggcaagagaaacaaataaaaggcatcaagattgggaaggaagaagttaaattgtccctctttgcaaatgaaatgatcttatatacagaaaaccctaaagattccaccaaaaaggccaggcacagtggttcacgcctgtaatcccagcactgcgagaggctgaggtgggtggatcacctgaggtcaggagttcaagaccagcctggccaacatggtgaaaccccatctccactaaaaatagaaaaaaagtagccaggcatggtggctcacgcctgtaatcccagctactcaggaggctgaggcaggagaattgcttgaacctgggaggtagaggctgcagtgagccaagatcacatcactgcactccaacctgggcaatggagtgagacttcattaaaaataaaaaaaaattctaccaaaaatctcttagaactaataaatacagaaaagttttggaatataaaatcaacatacaaaaatcaatagcacttttatacactaattacaagctgtgcaaaaagacaccacaaaaacagccccatttacaatagctagaaaaaacaaataaaatgtttgggaacaaatttaacttatgaagtaaaacagctgtacagtaaaaactacaaaatatagatgaaagaaactggagaagacacaaacaaatggaaagatatcccatgctcatgaattagaagattcaatattgtaaaatgtccatactacccaaagcaatctacagattcaatgcaattcctattcaaaattccatgggcatttttcacagaattagaaaaaattctaaaatttatatggaaccacaaaagatctgaatagtcaaggcaatcttgagcaaaaagaacaaagctagaagcatcacactacctgactttgaaatatactgcaaagttatcacaatcaaaaaagcatgatactagaataaaaacacacacatagaccaatggaacagattagagagctcagaaataaagccacacatttatggtcaattgatttttagtgatgatgcaaagaatacacaatagggaaaggagggtctcttcaataaatggtgttgagagaactgatattcacatgcagaagaatgaaattgaacccttgtctcacactagatacaaaaaacttgaaatggattaaagacttaaatgtgaagctgtaaaactactaggagaaaatgtaagggaaaaattccatgacattagtcttggcaatgatttttttttctataaacccaaaagcacaggcaatgaaatcaaaaatagacaaatggggttactccaaactacatagcttctgcacaacaaagaaataatcaacagagaaaggagacaacctataaaattgaagaaaatattcgcaaactgtacatctaataaggggttagtatccaaaatatataaggaactcaaacaactcattagccagaaaacaaattacctggtttttaaaagggcaaaggacttgaatagacatttattaaaagaagacattcaaataaccaagtatatgaaaaaacactcaacatcactaatcctcagggaaatgcaaattaaaactacaatgagataccacttcacacctgttagaacggctattaccaaaaagacaaaagataaaaactcttaatgaggatatggaaaaaggagaacccttccacaacattagtgggaatgtaaaatgaaaaacaatatgtgacccctcaaaaaattaaaaatagaattaccatataatccaaaagtcctattactggatatatagccaaaggaaatgaaatcaatatgtggaagagatatatgcactctcatgattactgtagaattattcacaatagccaagatctggaatcaacctaagtgttcatcaacaaatgaatggataaagaaaatgtggtatatatacacaatgaaatactattaagccatgaaaaagaaggaaatcctgttacttgcaacaacatggattaatctggaggacattatgttaagtgaaataagccagacacagaatgatatcactttctgaaagacaaatactgcatgatctcagagcttgactccacatgggctctttaataatgatagctgttagtgaagaaaacagaaagagcataagaactatacaagaggatagacatgaatatgttaaactcacatgaaaaataactctgctgtttgttgcttggaatactcatccagaagatatacacagaataagaacatagatggaataaaatgtggactttaaatttttgctgttttcagttttccccattgagaattccctgcattggccacctgtctcttaccactgcaaaggacaagaaggtatctccttcagctgacaagagagactcaccaagtgacagaagctttcccatggaggaacagtcccatgggattctccaagtaagataacagggaatcactaagaatttcctaacttatgtgggcaaatgtattatcaaggctactttgcttattctaaatcagttttactccagcataggctattaaaaaaaaagacttttccaagacaacattacacaaatactcacagaaaaaatctgaaggatctaaaaaacataaagatccttttcagaacactaatgggctccaagacagtcaggcatgaggcctttaaagaccatcactgaaatgaaatttcactgatgagtacattccaaaaaacagactgagacctgttttgtttcttctctttttgaaatgactttgaagtgaataaacatatcaatgacctatatataattaattggtgtctggatcttttttgtaagagacttgggttgagtatccaaaggcatgtgtgctctaagggcaaaaatctcagaacattttggctacatttaacagggggcaatgactgcaagaagggagaaaagggtccatgttccaggcttgctcttaatactatgcaaagagcctggggcaaaagaaagggatggaggaatacttaccaggcaaatggaaagcagagaaaatcaggcgttgcaatcctagtctctgataaaacagactttaaaccaacaaagatcaaaagagacaaagaagggcattacataatggtaaagggatcaatgcaacaagaagagctaactatcctaaatatatatgcacccaatacaggagcacccagattcataaagcaagttcttagagacctacaagaaacttagactcccacacaataatagtgggagactttaacaccccaatgtcaatattagacagatcaacaagacagaaaattaacaaggatattcaggacttgaactcggctctggaccaagtgggcttaatagacagctacagaactctccaccccaaatcaacagaatatgcattcttctcagtaccacactgcacttattctaaaatcaaccacataattggaagcaaaacactcctcagcaaatgcaaaagaacggaaataacagtctcttagaccacagtgcaatcaaattagaactcagtattaagaaactcacacaaaaccacacaactacatggaaaccgaacaacctgctcctgaatgactactgggtaaataacaaaattaagacagaaataaataagttatttgaaaccaatgagaacaaagatacaatgtacaagaatatttgggacacatttaaagcagtgtttagagggaaatttatagcactaaatgcccacagggaaaagcaggaaagatctaaaatcaacacccttacatcacaattaaaagaactacagaagcaagagcaaacaaattcaaaagctagcagaagacaagaaataactaagatcagagcagaactgaaggagatagagacatgaaaaatccttcaaaaaatcaatgaatccaggaggtggttttttgaaaatattaacaaaatagatagaccactagccagactaataaagaagaaaagagagaagactcaaatagacacaataaaaaataataaaggggatatcaccactgatcccacagaaatacaaactaccatctgaaaatactataaacacctctacacaaataaactagaaaatctagaagaaatggataaattcctgaacacatacaccctcccaagactaaaccaggaagaagtcaaatccctgaatagaccaataacaagttctgaaactgaggcagtaattaatagcctaccaaccaaaaaaagcccaggaccagaaagattcacagccaaattctaccagaagtacaaagaggagctggtaccattccctctgttactattccaaacaatagaaaaagagggaaatctccctaactcattttatgaggccagcatcatcctgataccaaaacctgccagagacacacacacatgcaaaaaaaaaaaaaattcaggtcaatatctctgatgaacatcgatgagaaaatcctcaataaaaaatactggcaaaccaaatgcagcagcaaatcaaaaagcttatccaccatgatccagtctgcttcatatctgggatgaaaggctggttcaacatatgcaaatcaataaatgtaatccatcacataaacagaaccaatgacaaaaaccacttgattatctcaatagatgtagtaaaggccttcaataaaattcaacaccccttcattctaaaaacactcaataaactagctatcgatggaacatatctcaaaatggtaagagctatttatgacaaacccacagccaatatcagactgaatgagcaaaagctggaaacatgccttttgaaaaccagcacaaagcaaggatgccctctctcatcactcctattcaacatagtattggaagttctggccagggcaatcaggcaagagaaagaaataaagcgtattcaaataggaagagaggaagtcaaattgtctctgtttgcagatgacatgattgtatatttagaaaatcccatcgtctcagcccaaaatctccttaagctgataagcaacttcagcaaagtctcaggatacatgtgaaaaaaatcacaatcattcctgtacaccaaaaatagacagagagccaaatcacgagtgaactcccattcacaattgctacaaagagaataaaataccgtggaatacgacttacaagggacgtgaaggacctcttcaaggagaacaacaagccactgctcaaggaataagagaggacacaaacaaatggaaaaacattccatgctcatggttaagaagaatcaatatcaggaaaatggccatactgcccaaaataatttatggattcaatgctatctctagcaagctaccattgactttcttcacagatttagaaaaacttctttgaatttcatatggaaccaaacaagagcccgtatagccaagacaatcctaagcaaaaagaacaaagctggaggcatcatgctacctgacttcaaactatactacaaggctacagtaaccaaaacagcatggtactggtaccaaaatagatatataggccaatggaacagaacagaggcctcagaaataatgccacacatctacaaccattggatctttgacaaaactgacacaaacaagcaatggggaaaggattccctatttaataaatggtgttgggaaaactggctagccatgtgcagaaaactgaaactggaccccttccttacatcctatacaaaatttaactcaaatggattaaagacttaacataagacctaaaaccataaaaaccctagaagaacacctaggcaataccattcaggacataggcatggtcaaagacttcatgactaagacaccaaaagcaatggcaacaaaagacaaaattgacaaatgggatctaattaaactaaagagcttctgcacagcaaaagaaactatcatcagagtgaacaggcaacctacaaaatgggagaaaattttttcaatctatccatctgacaaagggctaatatccagaatctataatgaacttaaacaaatttacaagaaaaaaacaaccccatcaaaaagtgggcaaaggatatgaacagacgcttctcaaaagaacacatttatgcagccaagaaacatgaaaaaaaaattatcatcactggtcattagagaaatgcaaatcaaaaccacaataagatacgatctcacaccagttagaatggcaatcattaaaaagtcaggaaacaatagatgctggaaagactgtggagaaatagaaacgcttttacactgttggtgggaatgtaaattagttcaaccattgtggaagacagtgtggcgtttcctcaaggatctagaaccagaaataccatttcacccagcaatcccattactgggtatatacccaaaggattatgaatcattatactataaagacacatgcacacttatgtttatcgcaacactattcacaatagcaaagacttggaaccaacccaaatgcccatcaatgatagactggataaagaaaatgtggcacataaacaccatggaatactatgcagccataaaaaaggatgagttcatgtccttgcagacaacatggatgaagctggaaaccatcattctcagcaaacacaggaacagaaaaccaaacacaacatgttctcactcataagtgggagttgaacaatgagaacacatggacacagggaggggaacatcacacaccggggcctgtcaaggggtgggggcatatgggagggatagtattaggagaaatacctaatgtagatgacattggttgatgggtgcagcaaaccaccatggcacatgtatacctatgtaacaaacctgaatgttctgcatacgtatcccaaaacctaaagtataataaaaaagaaaaaaatgcccaaatacccatcaatgatagactggacaaggaaaacgtggcacatatacaccatggaatactacatagccacaaaaaaagatgagttcatgtcctttgcagggacatggatgaagctggaaaccatcattctcagcaaactaacacaggaactgaaaaccaaacaccacatgttctcactcataagtgggaattgaacaatgtgaacacatggacacaggattggaacatcacacaccagggcctgtcagggggttgggggcaaggggagggagagcattaggacaaatacctaatgcatgtggggcttaaaacctagatgacaggttgacaggtgcagcaaaccaccatggcacatgtatacacctatgtagcaaacctttatgttctgcacatgtatcccagaacttaaagttaaataaataaaaaagagcctgggggatctcctcaggatccaagaaaggacacctctctgtctgaaatgcagaatgacagtgatagaaaaaactacagaaatggtcttcactgacaagcccaatagagaattcttatcttcaacaattctgacaggtagaatccagcttcatttttactacatctgggaattgggagctccttgccacttagtgcagaccatttccatatttgaatagttaaatgttctggaaagccttttgaaacttgagccaaagccaggtgctgagctataatcctagctttccaggcgtcagaggtttccatcttgggggtgcagaggaacatatgataaaattaggatgaccacccattctggtttgtcatggactgttctggttttagcatgaaagtcctgtgtctcaggaagccctataataaataggtcacagggctagaaatcacagggtttctagtcacaggacctgagttacagtcccagctctaccatttaatctgttgtgtagctttaggcaaatcaattagtcaatctaagcctcagtttattcatctatatgaggataataatacccatcttacagagttgatgtaaggattaaataagtaatatataagaagatttcagcagagagccttgtacacagtggagacttttaaatgctagcagatacatctataatgagtatactttaacatatagtgaccacaatttcccttccttacaatttccagtcataaagtttctcccatcctttgaaatactgcagaacatatctgattcctcttccaaatgaacactcttcaaatagctgagggctgtggcatgctccataccacccactttccactccaaatctataccagactggtctcctcttttccagactaaatatctctagtactttgaccatcgttcagatgacatgatttccagaattttgtccctcttattaacctttttgtagatctgtcatttgtaaagtgcaggccaagaactgagcacaacttccttgatgttatctgaccagcacaaggacatttggatgattatctcgttccttctggactctctatttccatcacatgacctcaggtcacattagcattttggcagccttaacccagttggcttatgttaagctgacagtcagctaacactcctgagcctttctcttgctcttataaactattaaacaaagtctcccttggtctggtttcagctgatcctttaaacacaaaagttagagtctaaatttatccctattaattgtatcatgctggttgcagcctatccttcaaggttgttgagatttttatggctccttagcctgtcagccaacatgttagctgtttttctcagttttgtttcatctttaaatttgataagaatgcttcaaactgttgatttaaaatactgaacaatttagggccaagaaccgaaccatttaaaagtttcataaaggttaagtctggttaatattaataactattaccatttgttcagtaattgctctgagccagatactgagttagatgcattgggaacattatctcatttgattgcagaactcttcaagataaatatgattgtcctcttcttacaaatgataaaactacacttatacactgttggtgagagtgcaaattagttcaaccactgtggaaaacagtgtggtgattcctcaaagagctaaagacagaaataccattcgacccagcaatcccattactgggtatatatccaaagcaatataaatcattccatactaaagacacatgcacatatgtgttcactgcagcactattcacaataacaaagacatggaatcaacccaaatgcccatcaattatagactggataaagaaaatgtggtacatatacaccatggagtactatacagccataaaaacaaatgagatcatgtcctttgtaggaacatgggtggagctggaggccactttccttagcaaagtaatgcaggaacaaaataccacatgttctcacttataagtgagagctaaatgatgagaagacatggacacgtagagaggaacaacacacactaggacccactggagggtgagggtaggaaggagcagaggttcaggaaaaatagctaatgagtactaggcttaatacctgggtaacaaaagaatctgtacaacatatcctcatgacatgagtttaactgcataacaaacctgcacatatacctctaaagttaaaagtttaaaaataaataaataaaaatatggaactaatgaaataaaacaaatgataaaactgagactcagaaatgtcacatgtcttactcaaattcagacaactagtaaggcttatagctgcattttggaaccaggtttgtctgatatcaaagtcaaaattctacagtgccatgctgcctttggaaggggagctgctgagactatgaaaaaagtctttaagccaaagtcctatttggaaccccaagggtaggtaaaccttatcactctctcctttctgcctcccacttccctgtgtccttcatcacagtgacccaccttcgtaggttagggtataaacccttctctccacactactttcctcttatcaggcccttgtccttccctcccatcctcagtcctgctgccttctacccactatatctttaatatcccagtttgggtttcaagaaattctcttacagtcttacccttttttttaataacacttcccctttgcaacttcttccattaaactaaaacattggggcaccacttccttcacctatttctctcacagagacacattcattcaattggtcattgatttaacaaatagttactcagtatatagcatgtgctaggtactgtcccaggaacagaaatagaacaatggaaaaaaaagatatggttcctgccctcacagagcttgtaactagggaaggggtagatatcaaataattacacaagtacataattacaaatatggtaagtgctacaaaggagaaattcagtgctctatgagactatacaatataagcacctattctagtctggaaaataagaaagacccctgctttaaaaaaatatttattacattttttgagtacctattatgtctcagatagtactagcacctactataaatgggaggatatataggtatacaatgttaaataaaagatatagaagtacattaatatttatactgtggtgtgatatctgatatgtaaatgataagcacagagcatatgaataagagctgagaatcaggaaaaacttcctgaaagcacatgcaatagttcagatgtgtatcctgctaaacctcattttgaagtttgatcccgagaaattcaaaggatcattagtggacactaatgagcaattatatgccaataaattggaaaatctagaagacatgaacaaattcctagacacatacaacctaccaagattgaaccataaagaaatgcaaaacctgaacagactgaaaacaatgagatcaaagctccaataaaaagtcttccaataaagaaaagcctggaccctatggcttcactgatgaaattctataaacaattaaagaagaataccagtcctactcaaattattccaaaaaataaaggaggaggaaatatttacaaactaattctatgaggccagtattaccctgataccaaaaccagacaaagacacatcaacaaaagaaaactataggccaatatctctgataaatattgatgcaaaaatcaccaacaaaatactatcaaactgaattcaacaatacattagaaagatcatttatcatgaccaagtgggatttatccctgggatgcaagaatggttcaacatatacagattaatcaatgcgatacatcatatcaacataatgaaggacaaaaaccatatgatcatttcaattgatgctgaaaacgcatttgataaaattcaacatcccttcatgataaaaaagacctcaaaagactggacatagaaggaatataccttaacataataaaagccacatatgacagatccacagctaatatcatactaaatgggggaaaaagccttttctctaagatctggaaaatgacaaggatgcccgctttcaccactgttattcaacatagtactagaagtcctagctagagcaatctgataagataaagatataaagggcatccaaactggaatgaaagaagtcaaattatccttgtttgcaggtgatataatcttatatttagaaaaacctaaagactccataaaaaactattagaactgataaattcagtaatgttacaggatgcaaatcaacatacaaaaatcagtagcatttctatatgccaacagtgaacaatgtgaataagaaattttaaaagcaatcccatttacaatagcaacaataaaattaaatacttaggaattaaccaaagaagtaacatatctctataatagaaactacaaaacaccgatgaaagaaattgagttcttcaaaagtgtgtaactccaagtgagcctgttcaatttggtcccataagtcataaattatatggatttaaaagtcgatctaatattaataaaggctcactttgttctcaaaatttgaagtaatgcacatacttatagcctaaaaaaatcggcaagaattacaaaatttcaaaactggcgcattgtaaactgcatatgcgtttgccaggtagcagtgccacttgaaatggtgaacagatacactgttattctttgtcagtatcctgtaaagcccaggattctttaccagcaccacacagcgattttggtgactattttaacattcacattgaggtcaggggtggtgggtcatgcctgtgatcctagcactctggcaggccgaggtgggaggatcatttgagctcaggagttcaagattagcctgggtaacatagtgagaccctgtctctattaaaaaataataatactgaggcaggagaatggcgtgaacccgggaggcggagcttgcagtgagccgagatcgcgccactgcactccagcctgagcaacagagcgagactctgactcaaaaaataataataataataacaataaaaataacattcacattggtattgttcactaagatattgttctttaaggcatttcttaaggtattgttaaaacttgtgttaagcatgttaaagtctcagtaactttgggatagaaataaaatgtgataaaaagtgaaagaaaccaccacaagggagagtcctttttgaaatattagagacataatgctgtctaataaaaaacgacatcaaagaaaaactacactacagtgattgcagacttaatgttggccaaccatgcatcctccctagaaatgcatttgaattttatttactaatcttttatttaggaaatttacatttttacattactgagattggtcttttgggctattatacttttttttttttttttttgagatggagtcttgctctatcacccaggctggaatgcagtggtgcaatctcggcccactgtaaccttcacccctggggttcaagtgattctctgcctcagccttctgagtagctgggactacaggcatgtgacaccacaccaggctaatttttgtatttttggtagagatggggttttgctatgttggccaggctggtcttgaattcctgacctcgggtgatccacctaccttggcctcccaaagtgctgggattacaggtgtgagccaccatgcccagcctggttattgtattttgacactgggattttgctagctctctaaagtaaataggataactgtatatctttttctgtgcattaagcaattataacatgggaatgatttgttcatgaaaggttgaaagtctgtacttgtagaacttttgagttcacagtgctttcagaaataatttctttataactgtcagtttcttctgtgactattttgttatctatttttaaatttaagcaactttaaatttaaaaaatttgttttaaaataaaaaaaaaagaaattgaaaaggacaccaaaaaatggaaagatattccatgttcatggattggaagactcaatattgttaaaatattcatactacccaaaacaatctacagtttcaaggcaatccctatcaaaataccaataacattcttcatagaaatggaaaacacaatcctaaaatttatatggaaccacaaaagtcccagaatggccaaagctatcctaaacaaaaagaacaaaactggaggaatcacattacttcaaattatactacagagctatagtaaccaaaacagcatggtactggcataaaacagacacatgaaccaatggaacagaatagagaacccagaaataaatctacacatctacagtgaattcattttttgacaaaggtgccaagaacatacactagggaaaaaacagtcttgtcaattaatggttctggggaaactagatatccatatgcagaaaaatgaaactagatccttatctctcaccatatacaaaaatcaaatcaaaatggattaaagatttaaatctaagactttgaactgtgaaattattaaaagaaaacattgaagaacatctctaggacattggtctgggcaaaaaattcttgagcaataccacaaaagcacagaaaaccaaagcaaaaatgaacaaattgaataatatcaaattaaaaagcttctgtatagcaatgatacaatcaacaaagtgaagaaacaacccacagaatgggagaaaatatttgcaaactactcatctgacaagggattaataactagaatatataaggagctgaaacaactctataggaaaaaatataataatctgatcaaaatgggcaaaagactggaatagaaatgcctatttctcaaaagaagacatacatatggcaaacaggcatatgaaaaaggtgctcaacatcattaaccatcatagaaatgcaaatcaaaactacaatgatatcatctcaccccagttaagatggcttatatacaaaagacaggtaataacaaatgctggcaaggatataaagaaaagggagccctcttacactgctggtggaaacgtaaattagtacaaccactatggataacatcttggagtttcctcaaaaaactaaaaatagaactaccatatgatccagcaatcccactgctgtgtatatacccaaaagaaaggaaatcagaatatagaagagatatctgcactcctaagatttggaagcaacctaagtgtccatcaacagatgaatggataaagaaaatgtggtacatatatacaacggagcactattcagccactaaaaagaatgagatcctgtcatttgcaacagcaatggatggaattggaaatcattatgttaaggaaaataaactaggcacagaaagacaaatatcacatgctctcacttaattgtgggatctaaaaatcaaaataattgaattcatgaagctagagaatagaaagatggttactagaggctgggaagggtggtggaagattgaggaggaggtggggatggttaataggtatttaaaaaaaatagaaagaatgaataggccaggcgcagtggctcaagcctgtaatcccaacactttgggaggctgaggcaggtggatcacctgaggtcaggagttcgagaccagcctggccaacatggtgaaaccccatctctactaaaaatataaaaattagctgggtgtggtggcacgcatctgtagtcccagctactcaggaggctgaggcaggagaatggcgtgaacctgggaggcagagattgcagtgagccgagatcgcgccactgcactccagcctgggcaacagagcaagactccgtctcaaaaaaataaaaatagctttgaagacaattctcattgaaggaagacgtcttatggaaacacacaattgctcaaagataaatgtataaagatattcactggagctttgttcgagaccagcctggccaacatggtgaaaccccatctctactaaaaaaacaaaaattatctgggcatggtgtcacatgcctgtaatcccaactacttggaaggctgaggcaggagaattgcttgaacatgagaggcggaggttgcagtgagccgaaatcgtgccattgcactccagcctgggcaacaagagcgaaaccccgtctcaaaaaaaaaaaaagaaagaatgaatgaataagacctactatttgatagcataacagggtgactatagtcaataataacttaatcgtacatttttaaataactaaaagaatataattagattgtttgttacacaaaggataagtgcttgagggaatggataccctatatgtgattatttcacattgcataccttaccaaaacatctcatgtatcccataaatatatatacctatgtatccacaacaattaaaaattaaaaaaaattttttttaagaaattcgatccctagtgttggaggtggggcctagtgggaggtgcttgtgtcatgggggcagatccctcacgatcaggttggcgctttccttgaggtaatgaataagttctcactctattcgttcctgcaagaactggttgtaaaaaaaagtccggcaactccctcctctctctcctgcttcctctctccccatgtgatctgcacacacccactcccctttgtcttctgccatgaagccctcaccagaaccagatgctggtaacatgctccttgtacagcctgtagaaccatgagccaaataaacctattttcttcataaattacccagcctcagatattattttatagcaacacaaatggactaagacagtatatcagcctccttttcaagagtgactaagaattattgagccagagaaaggggacattccagttaaagggaagagcgtaggcaaagctttggagaaggttgtatcataatacatttggagagtaaggagttcactgtggttaaagcagagagggtatagggggatagggatattattgacccatctatatgtcacactgaccatccaagccttaaaagtcaaaaaaaaaaagaactttaaggatagatgatgcttcacaaaaacaatattcagctacaagtgaattataattacaatacgtatgctagacaagactaataactaataaatatatggtgactgaggaggatagtgtgtgtgggtgtgtgggtgtgtgggtgtgtgcgtgtgcgtgtgtgtgtggggggggtgtgtgagtgtgttatgtacatgtagcagaggagggttgaaagttataacaaactacactccaaaatattttacaaacaacctgtaacagtttgagtaggtatgtgtttgcagtccaggtcataacaacataaaacatagccagaaatgtaactatgacactgcataaacaaaaggaaaataaagtacgatgatcccattactgatcatgcatactggcatgcatctcattcattagagtactttaaactaggtttaagtatacaattgatgaaaggagtttgttttgtttttgtttttgttttttaagctggaatgcagtgctgcaatttgtctgtcctagcagcattgcctatggacagtcattaatcagaagtgaattattacttccttatgaaatttagcttcagttttttcctcttgaacttatctggaaatctttaacatggagagtcatgctagatcctttcctagttggaaaattcaactcatccctcacatttatcttctgaagcccacttctctttattccgtcagagtgtaccaactgagattaagttcctttccatctctcacatatatgtgtctgtcactgtcaagaattgtggcgattaattttaaggggagggggctaaaaacctacatatggggtagtttaaacaaaaccacacctttagctatcaatcaaatgaaccagatgattgtttctaaaaactcaactttgaaaagattattctgcactaaggtttttgttttgtttggttttggttttgtttttaaaataaaaaagaacaattcaagtttggggaagtaaccagagcctcaaatgaaatattggctatctttttaaaaattttatacaccaatgggtgttttgttacttttgctttaaatgcggcctttaatttctttcttcttttttaaattaagaagctgtattgttcagagtgcaagttactgagacattatcaatttctcccaacacaccaggttcactgcacagaggcttgttctactggttagacctagagctcattaatattaaaaagtgaggttacttcattattggactgaaatttccattttcacttgccctgtctttagctctgtccttctaacatcaatgagtaagatagaaacatggaaaatatgctcatcaaatttatagatgataaaaagccaggagtgacagcaaatgttgttgatacaaggatcaagattcagaaagatttatgagaggctagggcaacgggctaaatgtaatatataaaatttagaatgaataagtacaagatcctcaacatgggttcaaaaatcaatcttgcaagtttagtaacagcaagtatgtaaaagacttaggaatcttaattaataatgagctcagtgtgtgttaacagtgtgatatgattccaaaaaaaaactaatggcacttgatagtgctctaagaaagtgtaacattgagaatgagaaggtggataacttagtcctgaattcagctttgggtgcatatattacagtatccttgggatatgcttggttaaagaaactgaatccaaattgcaaaagaacctgttcaagggactagattattcaacctaaagctaagatttagagaacaaagagtagctatactcaaatagttaaaaaagggattcaatgtactgtccatagatccagaaggggagaactaggattaatgaatgtgaatttcaggcaggcagatttcagctcagcaagaataaactctttcttcttcagacaaatattaagccaaaaatggaatgggcaacctcatagttccctacccctcactggtggtactcaagcccaggctggaaaacttctgccaggggaaaatcaaacaaacattacaatgatgattcaagaattatgtgtattattggactggatagtctatgatctatgctttttagacaaactcagctatcacaaaaagacctcttcaaagacagctcatctaggcccccacgaagcatacaatctcttacagctgtcagaaattatagccccaagtgtggtaaagctgatgggaagctaatattttagttgttctacgtggaatcttagccaaaaggtcaagaagcaatatatttcagcagtgtgcagcggcctaagagagagaaggaccattattttattatgtgacccttcttccaactgggtgagatcatccttgtgtttccaaaaacattgcccagaccctgtgtggactgtagggtgcagtaatgttatacttgggcctttcaaaaaaaatgatgtgccaagaacaaacccaactcaggattcccaaacagaaattggaggaccttttagtcagagcgaagaatacaaagatctgtgaagccagaagcttcagagattaagctgaatcaggaatttatttacctaaaatgtgttcagaccaagtatcattaatgctttccatcttgacacattcggtaaaagaagcaaactttccaggatgccatgcctcactttatatcatataatctgatacggggtggggtaggggaagtacagtaaatctagagtcctcattttcttatattgtgtttgagaatatttttctgaatctatgtaagtacttttttttttgagatggaatctcactctgtcacccaggctagagtacagtggcgcaatcttggctcactgcaagcttcacctcccgggttcacgccattcttctgcctcagcctcccgagtagctgggactacaggcacccgccaccacgcctggctaatttgttgtattttttagtagagatggggtttcaccgtgttagctaggatggtctcgatctcctgacctcgtgatccgcccacctcggcctcccaaagtgctgggattacaggcatgagccaccacgcccggcctgaaagtacttttttatctctccctgagaacttatgacattgctgttcctgatacctgacaccgtgaccattctcaaaactgcagaactatcgaccagaagaatgaaaagttatccccctcaaactacaaggggaatactagaagaaaaggaaaagcaaaaggcctctccactttaaaagcccatggtctcttccaccagaaggtaagaaagaacggccattacttatttagctcaattaagtaagaactttcttatagtcagctatgaccaagaaaacaatgggctgccttggggagctcaagcatggattaacctatccatcactaaaacaaggttgctcaagtcgagcacaaagaaacctagtgggtacttttgtacctaattccttagagacatgtttaagaagccccagaagttacatgtccaagccaaatgggtttgctaaggtgtcatcatcacatcaataattttgatcttcagtgctaaaaatatgaaacatatacaggcagtgctgctttagttgaattgggtggtaatggtgaagataggtggagagaagggaacctgtttttatttgctttgaatctttactattctacgtaaattttattctgaaaaaaagattcctcagatattctggtattttgaagcccactaggtaattattattcctcccagaagaatctgcattatcctacaagagggagacttctagaaatgcaaaaaggacacaacattatcattttctcctaccgcctgttcaaacctgttccatgaagctaattctcttctctccttgagatgaacctagagtatgtctattgtctagccccatcagatacgaaaatacaaaattccacacaaaacactttactctcacttttatccaaaatctaacttacttcaattatttaaatatcctttcccatgtaacagtcaaaaaattaaaaccccaagcttcatttagagggaatgcttcttcccctccccagcatgggctgctacaggctggaagcctgcaatgggaaagagggacatggtcaccttcttctctgggtgcctttccttgcttctcttcctccctgtcagctttcttgctgtggtttctgctctctccagagttgaagtagggcaaaggggaaggtggtactgtttggtaaggagcagaaaaggttgtacctgaaaggaaccagaattgcctagtgttaatgctctctgggtcggaaatgagttttaaactgtctcttttcctcatgggggcacttctgctatttctatggtgactccccttctccattaggacagctattagattgaggttcctttgagacatcaatctctctcttctggctggttgcttacagccttctcaccccctactcctctgactagacacttctatccctttcctgtaagatttccttacctgtgtcaggaaaccccctaaggtgtggtccctcagcagctctgtctgacatgtcccacacctgatccatagaacacatatacacacatatacttctcagtgcttcagggtcctcttctgtaagatggagatattaagccaagtgcagtggcacacacctatagtccctgctattccagaggctgaggtgggagtaccacttgaacccatgagtttgaggctgttgtgcactattatcgggactgtaaatagccactgcactccagcctgggcaacacagtgagacctcatctctataataaataaataagagaatattaatagcaactctctcctatggttgttgtgaagattaaacaaaacaacaactggcccaaaataaacactaagataacagtaactttcccaagctcatattattagtagtaagtagtaaaactagatctgtcctccttcaaagccagggaggtacatttcctgtcacactacatttccaggagggaggtattttgaaccaaggaactacccagaactactcaattcatccactctgctcactcataagactggctatgggcatggttttggcaacaaattgattgtcctggcacctctggttcaactctccagcagcaccctaaagctgtagatcagcagcaggaagtccctgggcatcctcccccttcactccagagcatcacaccaggctgaactcaagagctgtcacaatgctgggaaaagtgccaaactaatctctagagcatggggcactctgacacttgacatagacaagaggataacttttttcaccttcgagccaacattatactcttcaaatcctcttttaggaaaccttatataaaaccatgctcactcaatagacagcctccaaagtgaagcctgtctcactaggtctttgacactccttcattaggtgactatctgctaccaacatagagcaaaactagagagatttctgccctagagaccacatcttgaggtgcagaattttcccactctctgttctctcaaagtattccttagagtattccttaattgatatagttacattaaattatagagctagtctcacgtagactattcattaaatattctctttcagcacaccagagtcacattttctatgctttaaaggtcagaaatctttttgcaaacttcatatctttccaccccaaggtggagattcatcttcaaaggttcctaaaagggatgtgattctatcgcaaagaacatcttcctctggaaagaaccaactggcttccatcaaagcatttcacaacatttatgcatcattcctacaggctacttggtaattgcaaagacaaagatgtacctttacacaggggcaatatctagtaccttaaccacataatcaagctaagcatcactgatagtaggatactctaatgttatgttcttactgatgtgaagtgatacaaaacacaaagcatcatttattacatatcttgccaaatatgtttaacttgaatcttatcaaccctttaaacctaatttccagtttatgggaaatagaaatgataaaggaacaagtctaaaaaaaaaaaaccaacaaacaaaaaaataaccataaggaaacaagaaggctaattcagaacatagaatgtcctataagacaactggccaagtttcttcaaaaagtcaatttcacagggaaaaaaaataggtgacactgctcaaaaataagacactaaggagatataataaccaaatataatgcatgaaacttcatagagtcatggtttgaaggaaataactgtaagacacatcatggagaaaaactgaggaaatttcagtgtgaattagatatgagttgatattaggcaactgttactttcctgaggtgtcatagtagaatgtaactatagtagaatatacttataattaacatatatgtgatgaagtgtttgtaagtaaagcatcatgatgtccaaccaatgtgtatgcacatatccacacacattcaacatgtgttaacaagtgtgggtattataagtggatatgcaagtattcattgtaatattctttcaaattttcagcatgtttaaaaattataaaaatacaggtgaaatgtttctatttgcagatgtgaggacagtgtagaaaatcccaaagtatctataaaagcaaaatgaaacaaaatacctcctaaagctaattaagttcagccagccgattaggtattactgcaatgggctgcccagtaatcaaagaggactacttatttcccaccagggtttttacaaaaagattcattctgataagttctctgatgaagttcagacattgttacagggggtggcaccagcttctctacatctctatcaaaatcaaagaaaactcagaaaaaaatggaaaacaaaagttgccttattattctactatttgagcagaatctacctgacacaaagcaaatgcttgtttaatttcaatgacattcataaagttgtaattgagaaggaaaaaacgtaaaatttatttaagaagtctataaatctccctatttacaaaacttttcttaatatacaaaataaactgggatcaaaagtttttataaccctaaaaaaaaaatacaaaagtacagccaggttacagcttaatcaacacacaaatcaactgcatttctttatacaacaatggacatatgaaaactaaaattaaaaacacaatgccatttaaaattgctccaaagaaatacttaggtataaatgtaaaaaagtaaacacaccatgtacaaaatatgtatgctttaactacaaaatataatttaaaaattaaagagccaggcacagtggctcacacctgtaatcccagcactttgggaggccgaggcaggtagatcacctgaggtcaggagtttgagaacagcctgaccaacatggagaaacctcatctctactaaaaatacaatgcctaatttcattacttacccagcagtcattcaggagcaggttgtttaatttccatgtagttatatggtttttagtgagtttcttaatcttgagttctaatttgattgtgctgtggtctgagagactcttacaatttcagttttttgcatttgctgaggagtgttttacttccaattatgtgattgattttagagtaagtgctatgtggcactgagaataatgtatattttgttgtttttgggtggagagctctgtaggtatctatgaagtccacttgatccagagctggaggtcaagtcctgaatatccttgttaattttctgtctcgatgatctaattgacaatggggtgttaaaatctcccaccattattgtgggggtgtctaagcctctttgtaggtctctaagaacttgttttataaatctggatgctcctgtattgggtacatatatatttaggatagttagctcttcttgttgaattgagccctttaccattatgtattgcccttgtcttttttgatctttgttggtttaaagtctgtcttgtcagaaactaggattacaacccctgcttttttctgctttccattttcttggtgtttccattttcttggtaaattttcttgcatcccttattttaagcttatgtgtgtctttgcacatgagatgggtctcttgaatatagcacaccaataggtcttgactctttatacagcttgctgttctgtgtcttttaattggggcatttagcccatttacatttaaggttaatattgttatgtgtaaatttgatcctgtcatcatgacgctaactagttattttgcacacttgttgatgtagtcgcttcatagtatcattggtctttgtacttccatgtgtttttgtagtgttagactggtaatgacttttgtggtgtaggctgataatgatttttccttttcatctttagtgcttccttcagaagctcttgcaaggcaggcctagtggtgaagaattccctcagcatttgcttgtctgaaaaggattttatttctccttcgcttatgaagcttagtttggttggatatgaaattctaggttgaaaattcttttaagaatgttgaatattggcccccaatctcttctggcttgtagagtttctgctgagaggtcaactgttagtctgatgggcttccctttgtaggtgacatggcctttctctctggctgcccttaatgttttttccttcattttaaccttggaaaatctgataattatgtgtcttgggatttatcttctcatggagtctcttactggggttctctggatttcctgaatttgaatgttgttctgtcttgctaggttgggaaagttctcctgtatgatatcctgaagtatgttttccaacctggttccattctccccatctctttcaggtaccccaatcagtcataagttcagtctttttacattatcccatagttttcagaggttttgttcactccttttcatccttttttctctaatcttgtctgccttccttatttcagcaagatagtcttcaatctctgaaatgctttcctccacttgatgcattcggctattgatacttgtggttgcattgtgaagttcttttgtgttgtgcttttcagctccatcaggtcatttatgttcctctctaaactagttattctggttaacatttcctgtaatgttttatcatggctcttagcttctttgcattgggttagaacatctgcctttagctcagcaaagtttgttattactcaccttcagaagcctacttctgtcaattaattcatctcagcctccactcagttctatgcccctgttggagaggtcttgcgatcatttggaggagaagaggcactctggtttcttgagttttcagcattttttttgttgattctttctcatcttcatgagttcatctagcttcaatctttgaggctgctgacctttggatggggtttttggagggacttttttgttgatgcggttgttactgtgttttctgtttgtttgtttttcttttaacagtcaggcccttcttccgtaaggcttctgcagtttgctgggggtccactccagaccctatttgcctgggtccctccctacctggaggtatcaccactggaggctgcaaaacagcaaagatggctgcctgcaccttcctctgggatctgtgtcccggaaggggactgacctgatgccagcagaaaagctcctgtataaggtgcctcgcaacccctgtgggtgggcagggggaggggaggtctcatccagtcaagacggacaggatcaggaacccccttaacaaagcactctggctgtcccttggcagaggggatgcactgcactgtggggaatcccattcatcaggactgcccggattccacagtcagcactgggaaagactaagtttgctgatctgcagagactgcccctcctccctggggctctgtcccagggagatcagagttctgtctgtaaacccctggttggaattgctgaaattcccacaggaaggccctgcacagtgaggagcgatgggtcagggtccagcctagagaggcagtctggccacaatctgccatagctgctgtgctgtgccatggggaattcctcctgagtccaaatcacccagtatccccagcactggcagggggaaaacagcagactggagctgcagtgatggctcctgcccctccccgcaggtgctcagtcatcttaggcagcaggagaatgcagtgatggtggtcaaccctccccctggaaactcagtagtcttaggcagtctccagccaagtggccaccaagaatcttcacagctctatgcttgggacccaaggccctggtggcacggactcacaagggggatatcctgacctgtgggttgcacagatctgtggaaaaagtgtggtttcctggggcaggtagcacaatcactcacacctcccttggctgggggtgggagctccccttcccctgcactcccaggagggccattgctccaccctgcttttcctcactctccatgggttgcgccaactgcctaattcaatgagagaacctggataccacagttgccagtgcaggattcgttggccattttcattatcttggtgggagcctctgatggcaactgcttctagtcagccatcttggcccctccccgctaccacttttcttatgacaacaaacttgaaaatctaaaggaaacaaatgatgttctatcaaaatataaattccccaaattaactaaatgacaagtagaacacctaaacaacccaacaactacagaatttgaaaatatatatatattttttatatataatatacatatattaaagctctacaattaaaaatggtaccagattcaggatgtttgtggataagttgtccctaaattcaaggaacaacaatagaaggcttcccaattcaatttacagttctatcataatattaatgccaatacctgacaaacatattccaacaagaaaactagaatacttacaattaaaatctgaaaccagatattaacaaattaaatctagcaatgtgttaaaatagttatattctataactaagcaaagtttattccagaaagcaacatttcccaattttaagaaatctattagtataatgtattacattaaaaattttttaaagaaaaatatgtaattaagtaagtacatgccaaaaatatatttaaggtattggaacagatattcctgatcaattttcagtagtgatttttaagatgtgaatattttatctcttcatgcaaattataagcctttctcataccatatattatttctgtctgtgagctacatctacctgctataccctcattctgccatagatcccaggaatttctatgtagtgtatcaatcaatatatttagaagtagtttaaacatgcctttcaggagactagcctaagtaaatgcttcgtgaaaaaaatgtctatggcttagtaagtttgggaaaactatatattgtgtttttctcttagagatttgcaacaaaggttaatttaaagactcagagaagtcttccagggtttcccaagttaattgaacataaaacacttttgttcttatgatgcctattaataccccatgaatacactttgataaacactggtttagatcatgtcaccacaatgtcagtctcagcacgggtggcatttattgttcagggcattgtgtgaggtactactgcagatattgaattataagatataatctattcccacagatgattataatgaagtttagtcagaacatataaataaagagataaataatttgaggcaacatggcatacgtaccatataagccatccaaacaaaaagtgtagcaagggtgcataggaggcaggaatgttagatgctaaatggttgaggaaggtgtctaggaggatatatgagttaatccttgggagaaaacacacacacacaaacacacacacacacacacggcaaaaatgtgaatcatatatttgggagaaattaaagcactggtttatagctgttcaaaaggtaggtagggtgacagtgtaaagtatcttgctttaaggatctggatctttattactcagcccataaagaactaatggaggtctttcagcaaggagagagcatctcagggtaagtgtatttatagaaagttgcaattaacacaaaagttttcaaaaaaatgttttctgtttgactcctgtcttagcctaggctccccacaaaagcagaacatatgacaaagtccaatgtacagatgctttattctggggtatgatcccaaggagctgcagggagagcctgggaagaataaaaaaaggaagagggaaatgcaacccaatctagctcctcaccactgtgggcaactgaggcttgattcctctgggatcctctaaaaggaccagaaaggatacctctcagaattattcactcaggagttgaaaaagagaaacatttatcttccagttcccagaccccattaacaaaggattgccctcacatctgcaggtttgtatatgctccagaatgcccacatgcatttctacaggtatcctacttagtgaaggtggagaaaccctggggcagaaagtgagaaataaacagtgaatctaaagtgaggcattgtcaagttatacctgcatgcaactggtgaccccagcaatggctggagtaaaaaggggactcctcccagaaaagtctatataagaggtgtctggtagactctccaaaggaaggtcaatccaactcaacaccatacttcctggttcctacctgatttattttccagcaatcctttacacacatggtcgtttcatatgtggtcatctctaggctttttagcattgtttttttttttctccttccatttccccatgtcattctaaaacaaataaatgaaaacaaacaaaaaatagacataccattttttaaatgttgctttaatttatttatacaaagaaaaaccattttagatttgtttaataaggtaaatttgatggcaaaatgaccactagaacaagttctcagacaagatgtatatgctctgtaggtaaaaataaacttctacaagaaagttttcaataaattttacacttctatgacagccctgtatccccagtcagaaccaagcaaagcactaaagtcattcctctgcttattccagttaccgggtctgctttggcagaagccatatttggaaatctggttcttcataattgccacaaaccagcaatactcatcttccattcatttaacaaatattcgttgaggaccctctgtgatccaggtatgattttaagctctggagattaaggtctgaacaaaacagagtaagtctctgccctcatgaaacttacaatctcgcaggggaagtatacaagtaaatatgtaatatgttgaatggtgacagaagctgtggaaaaaaaacaaaacagtataagagaataaaggattcccagatgagaagtggaaagatgggtatcacaattttatatagcatggttataaaataaatttgtacagagacatgaaggaagtgagagaatgagccacgtagatagatggggaagaaacataccagatgtggtaaaaacagctggcaagaacttgaggcaaagtaatgctcaccccattcagggaagagtgaggaggccactgcagtgaaagcagagtgagcggggggatgttaaaggaggggatgtcagagaggtagccttgggtgagatgatatagggccttggagaccattataaaacttagggctttactctaattgaaacaggaagctatagaaggattttcagaagaggagtcatgtaatcaactcacatttttaaaggatcattcttattgccatggagaatagatataggtgtcctagggtagaagtgagcaggccacttaggaaggtaggtggaagataatgatggcccagatgagaatgatagcagcaagaaatggtagggttctaattatattttgaacacagagcgggcaagattagttgatgaattggatgtgttctacaacagaaaatgagaaatcaaaaatgactctaagatttttgacgtgaattgccatttaacacaaagagaactgtaggtttgaggttgaaaaaattaaaagttcagcttagggcatgttaagtgtgagctatttattaaacacccaagtgatgatgtcaaatgggcagttggctgtacgcagtcctctccttgcaagattccaacacgcacaaacttcagtcacccaggtttagttaaataacaccagtcctccaaaaatatgattgaaattgcatttgccacattatagtaactgaataatcgcataaagtacaatttcactgtttctcccatccacaaatcactctgtatataacagatgtatattatgattagtgaccaatcatgtcacttctttcagagtctgcctgactgattggtcaccgactggtcacttgtgcatctattattcagttcacacacagcaaaatgtgtcactgtgttgtctcctgtctctcagtaataagcccacatgacattccacaaaaatggattatcaaaagaagaaactggtccacaaagatgaaagggcagcaaggaaaaacatgacaacactaaaagtgaaattcaaatcaaatataaatggagttaaagaagaaatagctgccccaggaatactgacactgccactgtttaagacactagaatgcagccacaagcacttcgtgcaggtaactttatagacataaaggaggaaagtgcttgtaaggaaaaagacgaagatgttccagaggaatacgtcagagcaagtgattcaggcaaaatatttcacattaaaagaactcttagagataggtcacaacatctaaagcacaaaggctaaaatgttggaagctgatccaaatttagaaagaaatatgataatttgccaaggtgtaggattgatgcttactccatattgaaagttatatgacaagaaggcaagcactgttctaagtagtctgataagtgttttacaaataaatgaaacactttctcaatgtttctaatgttttaaattagtgtactaaactaagtaaatattagttttaaaatattactttttatttcttcgttacctcatatgtttataatcaacagtaagagcctaatattttgaaaaaattttaagtcctgcaacaatcataatttttatcactgattattaagaacacttggtgctgtctcagtttgcacagtcatttttatggcccacactactgcatgaagcaagaactgcctgtatgcaaatttggagtttaggagaagaaattcagctggagacataaatttgcaaattatcactacagaaacagtattcctgcatgatatcacctgacgtacagataaagaagagatctaaggatagagccctggggaactccaatgttcagaggtaaaggaaaggagaaagaatcaacaaagatgactgaaaagcagtggctggtgagctaggagaatcaaaagagcagtatcccaaagaccacaaagcagggagtttcaagaaagtcatcaactgcggctggtgagagaagcaagacaaacctgagaattgaccattgtgtttggcaatatgaaggttactagtgacctcggcaagaactgtttcaagaaaataattggaatgagagcccaattcaagtgagttcaaaagagactggaaggagaggagtggaacaataaatagacagccttctgaggagatttttctatagggcatggcagagtggaatgtgagtccattctgtcttcttaagatggacgctatcacagcatgtttataggctgactaacatagttaactaaagaatttataccacgagatattgatgccaggagaagggataattattaaaacggtgtccttgagagtggatagtacctcgtactcaagtggaagtgtttaccctagacaggaacaggcttaagaaggaggctcagacatttgacttcttcaggactcagctgcctcaactgtacaatgagacagcactaaaccagagattctcaaaatgtagtcctcagatcagcatcatcggcaccacttgagaattcattaaaaatgcaaattctcagcccccttccaaaacctactgtattagaaactctggaggtgaggcccagcaataggtgctttaacaagctctccatgggatcctgatgcaccctcagttttcagaaccactggactagattatctttaacgaatctctggctctaacacctgtgactttatgcttcaataatctattacttcccatttctattatgtttttataatactgctgtattattttcaagtaagtttataaaatccaagctgttttctaatatttttcagtgcaaaaaatccaaatgtctgttttcaacctccagaaacaataatgacatttatacttcttaaaatcgtgttcataatcgtttctgaaacaacttttgcatggtaaggtattcaacttagttttgaaggcatcagtaaagctcatgacattttcttatcatttttaaataatacataagtctatcttttaatgaaaaaaatctttgggaattaaaagctattgctctcaagttgtttggaattgttttgtattgcttgaagtgtgttattccccagaagcagagcagacatggaacgacaggtgacattaatccagtcccatactgttgttctttgtggacttggatctctcttcagccacacaatggaggaaattccatacaaacagaggaagccagactctttctgggagaacttagtagctgacttactatattagacattgatgcctgctacagataaaacctgggaaaagacctccaggtcctattctccattgttgctgcctgagtccagtatgtacgtctcaactgtgtacacatttcccggggttagggggggcccaccagtgcacagctgtctgtgacaggattgctgatgtttacagtagcaagttcaccctgctttatgccaaaacatggtgtttcttattttaaagatgagaacaattccttctctcccctcactccattgttatttggtttactagatttacaggagaaggaagcagtaaattactaaagaagaaagtgtaaatctcaccagggtgtgcctgtttgaatttggatgaagtttggcatatccatcagatgtgatgatatgagaaaacaggtcctctctgcttcgtggtaggttggtttggggaagtgaaaataaaaattcattagacactttcctgtgttgatgtccacacctttctagaagctccaagttgatcagatgtcctaagtgcccagcttgatggccacagaaagccagctggttagtgaataaaaaggactctgctagctgagaacgctcattgccagcaagcctttcttgatggtttccagccttttctgtatttaattcggttaacattgcattctcccatcagggtctgttaataatgatgtgttgggggaaagaagcatgcagtgggagggatggaaaggagacatggaattcctatttcttcaatcacaaaagtaaaagaaaataaaagaagatttaccttaaagtacaaagtattttcaaaccacatttatagaaagccagtattaaaaagaggtcagctgatgcataaagaacatacctataaactaaataaatcatctgtccttcattctattcaataattctttcctgaacagctggctgtttctccctggctcagccacctccctttcctgccatggctctcaacactgtctatacactggagtcacccagagaacttcaaaaatactgaggcataggtctcaccctcaaggattctgagcattttttaaagttcccccaggtagttctaaaatgcagccaaagttgagatcaccgctcttcttcccctcagctctccatcaacccttcaagaccagcaccttggggttcgcttctcccccaaagaggctgagatgacaaacgcagacctggtcgttcttaggtcactgattcccaagttgcctgatgtaagaatcactcggggcacttatcagacatatacatcccaggatcttcccttggagattctgatttagtagttctgggacaagaacctgaagtctacatttgcccacatgaggtttatgcaaatagcaaagtttggtaaacaccattttaggactcttctgctcaaagtgaggtccatggaccagcagtatgggcattacatgggagcttgttagatatatagaatctctagccccaccccaggtccactgaaacaggatctgtttttttgggtttttttgttttttgagatggagtctcaccctgttgcccaggctggagtacggtggcgcgatctctgctcactgtaacctccgcctcctgggttcaagtaattctcctgcctcagcctcccgagtagctgggattacagccacctgccaccacacccagctaatttttatatttttagtgaagacggggtttcaccatgttcgccaggctggtctcaaactcctgacctcaggtgatccacttgcctcagcctcccaaagtgctgggattacaggcatgagccaccccgcccggccagagtctgcattttaacacgatttcaggagattcatatgacattaaaatttctccaattggtttgcctaacactgacttccaaagctttctctttccctatctaatttagactcacgcccgtgctgcaataataattactcataagaaatattcatattaaaacgaataaaatacattagttggattatcataaatgggccaattactttaaaacattttcataagtggatatttctggcttgttagattctccttttgctaatatgtaagatgagccttagagagcctcggcattaactcaagagttgaatgttgcactcagttctattatttatttttaaacatagtaaacatgaattataagctcagggttggaaagaactttaaggatgacttagtcctgcctttaatctgaatcactacaaatgtccaaatcaagtggccattcagtttagatatgaagatcatccccacccccaaacatgaaagagaactcattacctccctatatagtccatttcatcttcggtcagctatgacaaaaaaaaaaaaaaatcatgcattgaaaaactatctccctgcattgttttaattagaaagctttcttatttatggaaaaacttgcagaattttagagatgataggacagtttatagcaggatgcaatttatctgcatacatttaatttactgtaaatattagttaatgtctaatgggtggtaggcaacatgctgacactgtatacacaccagcaaacaaaacacaggccctgctctcaaagtacttgccagcccaataatatacagaataaatcaggagttttaaatactttgttaaatgtgataaaacaggggtaaatacaggaccataggaggttatcagagggatacttaatccagtatagaggataaaattctggagaagcgacatctttgccaaggttgaaacataagtggctctaagtcagtgttgccagtttttgcatagcatgaagtggttttatcttttctccgatgctatgttaaatctctgttaactgataactttctacttacttttggttttcaaaatttagaacaggccaatgcaagaatccaatctcatcctctgatttaaagactctccttcttcaagtctctggcatcttcagtgtgtcaggactgggaggaggaaggaggaaaggggcaggtatctatttaactggacacagtgaaagtttttcactgcctctggttaacacggactttccttgatgtcttcactctgcaagtccttaaatgtaggctctcttacaggaaacgtgtgagttcctttccactactccattcccggacacttcccctcttccacattcacccactggtccattctacagcttccaggaaccagcaaccccttgcctgccattcctcttaactaaagttttgtcaggatatctcaatttagctatgtctcatggagtccattattccagttttcaggataccagatcaacataccaaaaatcaatctgatttataaacactagaaatgaacaattaaaacccaaaattttaaaaacagtatcattaagaatatggccaaaaaaattaaatactcaggtaacaatctaacagaagtgtccaggttgtgtttgctaaaaagctataaatggaacacatactgtgtttaaaagttagaagactcaatacatgcaaaatgtcaattatctccaagctgatctacagattaaacacaattccaatcaaaactcagcagaattttttgtaggtggagacaaactgattatataatttatatggaggggcaaaggaactacaatagccaaaataattttgaaaaaaaaaaagagcaaagttggagaattcacactgcttgattttaaaattactataaacatatggtaattaagacaacatattatcagagaagggatccagccaaaaatcaatggggcaaaataaaaatgcacgcaaatataatcaattaatttgttttaacatgcaaagggattcaaactactgtcctttgcatgttttaacatgcaaaggacagtagtttcagcaaatggtagtggaataatggacatccatatgcaaaaaattaacccatgcctaaaccttacactttatataaaaattaaatcaaggccgggtgtggtggctcacacctgtaatcccagcactttgggaggctgaggcaggtggatcacgaggtcaggagatcgagaccatcctgactaacacagtgaaacgccatctctactagaaatacaaaaaattggccaggcgtggtggcgggtgcctgtagtaccagctactcgggaggctgaggcaggagaatggcgtgaacacgggaggcagagcttgcagtgagcccagatcgtgccactgcactctagcctgggcgacagagcaagactctgtctcaaaaaaaaaaatttatagatatagatatagatatggatataaaatcaaaatggatcatagagctaaatgtaaaacagaagctataaactttcagaaaaaagcataggaggaaatttcataacaagattaggcaaagagttcttaaacatggcattgaaaggacaattcatttaagaaaattaataaattgaacttcattaaaattaagactctttcctctgaagctccttaaaaagctaaacatagaattaccatatgactcagtgattccactcttaagtatatagccaaaaggactgaaagcaggaactcaaacagatacttgtacaccaatgatcattgcagcattcttcacaatagttaaaaggtagaaacagcccaagtggccaacatttgaataaataaaagtggtatatacatacaatggaatgttattcagccttaaaaaggaattaattctgacacatgttataacacgaatgaaccttgaaaacactgaaataagccagactcaaatattgtatgactccccttatatgaggtacctagaaaaggcaaattcacaaagatagaaagtaaaataaaggttattggggtttgggaaaaggagggaatgaagagttattgtttaatgggtacagagtttctgtttggggtgatgaaagacttttggaaatagtgatggttgcacaccactgtgaatataattaatgcccctaaattgtatacttaatagttaaaatagcaaattttattataactataatatacaagtatattatatatataaatttatataaatttcatatatttatatatgtaaatataaatatacatatatagtggcatatatatatatgtcacaactttttaaaaaagaataaggtctaaaaatatctttcccctgtgaaaaacactgttaagagaattaaaggacaagctacagagcaggagaaatatttgcaaattacatatccattaaaggatttgtatccagatacttcacctcagaggatgtaagaatagcaaataagcacatgaaaaaatgttcaatatcattagcccttagggaaatgcaaatcaggatactactacaggatgagatactattacacacctattagagttactaaactaaaaaatcacgacaagaccacatactggatggaacaacttaactctcatatgttagaggtgataattcaaaatgttacagccactctggaaaacagtttggcagtttcctatcaaattaaacatgtacttatccaatgactcatcagtggcactcctagttatctaccctagagaaatgaaaactaaaatgtttatagaaactatttataatcgtcaaatccggaaacaacccaaatatacttcaatgagtaaatagtaataaacatactgtggagcatccatccaatggaacactactcagcagcaaaaaggaaccaactattaacattgtcttcgtcaagactgctatataccatagacaggatggcttaaatgactgacatatttctcacagttctagaggctgagaagtccaagatcaaggtgcccttagattcaattcggttcttggctaaggccttcttcctggcttgccaagagcagccttctcatggtttcctgacaaggaggagaaaatgagttctatttggtgtctcctccccagctttttttttttttttttttctcttgagacagagtctttctctgtctcccaggctggagtgcagtggcgcgatctcagctcaccgcaacctccgcctcccaggttcaagcgattctcctgcctcagcctcccgagtagctggggctacaggctcccgtcaccacgcccggctaatttttcgtatttttagtagaggcggggtttcaccgtgttagccaggatggtctctggtctgatctcctgacctcgtgatccgcccacctcagcttcccaaagtgttgggattacaggcgtgagccacggcacccggcctcttcctctttttataaaggcactaatcccgttgaaggactccaccctcacaatccaaacctaattatctcccaaaggccccacctcctaatattacattgagggttaggatttcaacataggaagttggggttgggcataaacattcagtccatagcagatacacacaacaacatgaataattatcaaagatagtatcctaagccagtctcaaaaggttatatgctatacgtttccatttatatgatattgtggaaaaggcaaaactataggtactgagaacacatccgtagttgtcaagggttaaggtggaggaggataggaccataaaaggatagcatgagttagtattttgggtgatagaactattctgtatcctgattgtgatggttattgcatgaatttatatatgttaaaacctctagagctaaaactctccccaaaaaagtcaattttgttgtatattaatttaaaaaattaaaagatggtgttagattctagttagggagcaagagtatcagaaaaggacatttatgtaaacctaagtgtactacaagccgagatcattaccagttataactaggatatagcgattgtctatttaagggaaagaatttttttttaagtaatggaactacggttaaccttacaaacttcaaaatagtaaaatacgtaaagagaaattaacactagcctgtgaatctggtagtgggaagaagattcactggcggaggaataaggagtcctgctcaaatatcagactccagagcacatcaaatggagcctgagcctgaagatgagtgtaacgacagaagaacgtgagcaagagtcagatctgaagaatggagaggcatttcttcactgtctcccctactcctttttttttttttttttttttttttttttttttgagacggagtctcgctctgtcgcccaggctggagtgcagtagcgcgatctcggctcactgcaagctccgcctcccgggttcacgccattctcctgcctcagcctccggagtagctaggactacaggagcccgcccaccatgcccggctaattttcgtatttttagtagagacagggtttcaccgtgttagccaggatggtgtcgatctcctgacctcctgatccgcctgcccaaagtgctgggattacaggtgtgagccaccgcccctggcctttttttttttttttttttttttttgagacagagtcttgctcagtcgcgcaggttgaagtgcaatggcgagatctcggctcactgcaacctccgccccccaagttcaaacggttccccttttgaagagagcaattcagagggccattaactatataagcacaagaaaagtccaaagatcctggagctacctagggaacagagctccaaagaaagcctcctgcgtggaagcttccctgaggaagagctgataacaccttaaacctcctctggattcaagttaaaggtgagagggaaattttccagtggaatcctgcccagcagttaattacaaatggcaaattttaaatcatctctgctttggtgttctgtgttagaatggaaatggagatggacaaactgtttacttctttcatttactttgtagcgctggggtgaggggactctaggctgttttgtttcaaggaattgtttaaactttttattaaattttattttaatcaagacggagtctcggtctgtcacacaggctggagtgcagtggcgctagctcggctcactgcaacctccgccttctgggttcaagcgattctcctgcctcccgggttcaagtgattctcctgcctcagcctcccgagtagctgggattacaggcgctcaacaccatgcccagctaatttttgtatttttagtagaggtagggtttcgccattttggccaggctggtctggaactcctggcctcaaatgagcctactgccttgggctcccaaagtggtgagattacaagcgtgaaccactgcatccagctcagattttcaaagtgagggtaaattctaggaaataaaacagaagattatagaggtgaataatttaagaattttaattaatgcatagaaaataatagtgcatagtgctggtgtcttagaatatgtttactattctttgaatatttatttctgaaattcgtcccttcatttgacagagctgtatgtggattactacaaatgtccaccagagggagactcaagactgagttttccccttggggttccttcaggtttaattagtacttgggccaaaatctctaccacatgttgttatagggaggcaatccaagacggcgaagagatttatggttctggaatgagataaaaggataaataaagggatggttctatccttaaacatccctgctttttctctggggcttgggtcactttctcttactgatcctctgaggtttgcaaaactgagttatttgtctgcttttgaaagcaaagcccttaggattcctggcactatccacgctgaaaaaaaccgtaggaatactcccacccactagcaaagaaatgtgtcattcaactcacaggaggcatttactaaattcaggagatccctccagggattataatgttctgccagagccaaaggcaatctagtcccaagccataccatggaatttggtagaggatggttttagtcttccctgaagtcttcatttgttagttcattcaacaaagaggaagactttattaagaggcaggtattgtttcactttttaaaagatatctctaattataggaaaaatctaataatgaaatgaatttatcattaacatgcaaaagctgttctaaaacagatttctgaatagaacatgttgttggtatagtttacatttgagattttaggaaacacttttatatcacctattatgtgcaaaggggaaaagctttttgacaaacagatattaacatagaagtacaactatgaggcactgctgtgattttccttttcagagttttgttttttaataaatcagacatagatggttgcacaattactttctattcatgatcacctaatttcccacattaagccctgaaaccaaatcttgaaaatgaaaataaaattagactgcaacctgccacccactagggaacaaacacctctacatgccttggctacaaatttaacaataaaaaaagactttaaatcccactttaatatctaggacttgggggtctggggtcaggtaaaagcagggtaatagcaaaggagtgatttttcccttacttctaggttaagcaggctggttgtacggggaagcagtgactggtaaagagttaaagctcacagagttaactcactggttaagagttaaagctggttaagagtaccagctcacagatttgcagtgagaaagaacccaagctcttagcatccttttccttgggctctaaatcagttgtgggaaacagtgaaaggtaacatacaggacaggatttttttagcgagatcaccttcagccatggtttctgatgcaaaatgttctcccgccagcacccaagaccatagatgctgtggcggtggtggcagcaaacactgggcatgcttggacgggcagccacagggttgccacggtctcggcagggtctagtagacagaggtcttgtgatatctgctgggagtcatgggaacaagtgggaatttatctttggttccagagaacataaaatgacccatttcttccagttgcgcaataaaagagaaacttaagaaggaaaaatgaaccagtataaaatgtaaacttagctgtgtctgttttggtcctagaggagcaaaggtgattggattgactgcagagactatgacacctcgccatttcctcttgtccataaacagacacagaattgcaagaacttttacggccaaaggttaatcatagaaagggattggtttccatctccaagaaacaaatccgtaccagaaatctgatgacatgttcctggatggaccataaaaaccattttcctaaataacatcagctgactctctggattctatctttgggactatcctcaaattcattagggaaatcattatattgaatcagtttaattttaccagggtatcacaccatttgcaaagctatgtcatacaatcacatagtcagtatggatgaaaatactattaattagagataagcatttgtccaagaacttgctgtaataggatcttgtggggatttatcaaatcttgtgaggatttatcgtagtcctttgccaatcagaaacacaaaatagatttagatgtaaaaatggagttctccatcttacaggaataggtccttgtgactttttctttctaagaaaaaaaatgagctcatttcattattctcaccctcctctcctgtttaaagaaatctgatctggtaggaaataacaagcaatgagccttaaattttagtattatctttttaagagtttcttaaaattgccttttgaaagtagttcaggcttaggcccaaaaataattatacttaggtcataaaaacagaatttctaatatgcaaaattcttttagaaaatcttttaaaacataataaccatgtaaaccttactctccatttctttatgaagaatggaaattaaacatgataaaataatctaattttggccaggcacaatggtgtttgcctgtaatcccagtgctttgggaggctaatgtgggaggatcacttgagcccaggagttcaagacagcctgggcaacacagcaagaccctgtctctacaaaatatttaaaaattagcctggcatgctggtgcatgcctgtaatcccagctactcaggaggctgaggcaggaggactgcttgagcctaggagttcaaggttacagtgagctatgatagtgccactgcactcatgcctgggcaacagtatggccctatctcttaaaaaaaaaaaatcgaatttcttcacaatcaacttttgaatgacttcttaaatgacaaaataggctgggtgcaacggctcatgccttaatcccaacactttgggaagctgaggcaggagaattgcttgaggataggagtttgagagcagcctgggcaacagaggaagaccccatctctacaaaaaatacagaaattagccaggtttggtggtgcatgcctgtagtcccagctacttgggaggctgaggtgggaggatcacttgagcccaggaggtcaaggctacagtgagtcatgatcttgcactccagcctgggtgacagaacgagaccttgtatcaaaaaaaattaaaataaaataagtgacaaaatatatttatcttatagcttaatatatttgtgtttcctaatggaaaagttgtaagataaagtcccacaggaatgaattctagaacggctctataattataatttatgtaaactacacacttgtatattatagctttacaaatcatgttacactctagtaaaactaatctaataaagtaatttcctcagtgtgcccccagacaaagctcagagaaacatgtggcttagccaaaggtaggtatgtggtagatcccagcccagaatgcaagtgtcctaatccagtgctcttttttggccatcatgatgttcctactctctgctagattagctcttgccatctcaccatgttcctgaagccctcctctaagtgttgagcctctggacctccctagtctgggttctctgacataacccctcacatcccacctggcctcccttagcccatccttccttgatcattcttccttgccctctgctaataaggccacgctaacatatatctgacttgttttctccatcaaaaatctacatccccttcccttaaccgtagaactagatattctctgcctaccaaggttacagttatcttgcctaataaattcatctgtctatgccacgcttgtccaacccatggccagtgaaccacatgaggcccaggatggctttgaatgtggcccaacacaaatttgtgaactttctcaacacactaagagtttttttgcaattttttttttttttttttttttttagctatcactatcattagtgtattttatgtgtggcccaagacaattcttcttcttcccatgtggaccagggaagccaaaagattagacacccctggtccccacactaaggaaagagggctagagaagctctttcccctcctaggtgacatatgcatggcttctggaggaagaaaagatattacaacagtagcgctcttcagaccagcattgaagtaccccatggaggccctttatcagattattgatacattgaaaactaccagatctctgtcttcagtcttgataccttactgaagttccagatctctatatccaattgcctgttggaattagtgtgacggtcagttttagttacctatggttagtggtcatactggccctgagcatagacttaaagggcctccatggggtacaactcagatgtcttttttccaggaataatcacatcaatctcaacaacccactgcctacccagaatgacctctatctttgagaataagtattttagcacaagaagattctggcctttgattggaacaagatcaatgcaacaacaggcttagcagcttacaaacaaaatgggaagtaataataacttgtttatagagaacacctgccacaggccagacactggagacactatttatttttatttatttatttattttgaaacagagtctcgctctgtcacctaggctggagtgcagtggcaccatctccgctcactgcaacctctgcctcctctggggttcaagtgattctcctgcctcagcctcccaagtagctgggattacaggggcacaccaccacacctggctaatttttgtattttagtagagacagggtttcaccatgttggtcaggctggtctcaaactcgtgacctcaggtgatctgctcaccttggcctcccaaagtgctaggattacaggcgtgagctaccacaatattattaattaatttgttaattaatttaacatatattcaagggtaacctactacctgctaggcacattttaaagtctagagataagagagagtatgctatttggggggaattctaactttattattcaatacaatcagaacatagagttccagagaagagtggaaaaagataaggctcaagaggtaaagccaagaaggcaaaaaatcaagaagacctagtgtcacacgaaggatttttgacatttatgttttataaataaagaaaggaaaggagagagggaaggagaaaaataaactttttatctgaggaatgtgaaccccctctaattatcaggcctagaggcattgaaatgtggcagcatgtgaaacagtcacccactccccacttgagctaaataattgcctcttaaagccccttgctatgtgggttctagacactgacactaagtcaccataaaatgccatacctggacaccataactcacaccctatagttcaacaatgtatagccaatcactaaccaatgttatttctgtaaaccaatgagaattcctgccgaacaactttgtatcagcccactccttgtctctttttgcctaaaaaacctgcttgtaacaaagaccaagtggagcactccccaaggcaacttggaagtgtgtcacaggcagctgtcctcaatcttagcctcacaggcagctgtcttcaaccttggcccaaacaaactctctatatgaattgttcctcagtttctttctttgcattgatagatggaaagaaggaagtcactgaacagttttaattaggaaaaaaatttgcactgtaggaaaattcctctaatagcagtgcagaattgcagcagtaatctaggagagaaaaaggccagaacaaaggtggtgacagtaggaaaagagggaattagaaatgtccaaaagacagcaaaggtagaatcaatggctctagtaactatctgaagagactgagctgagaatggggagggagaaggtgaaagtgactgccatgtttttggtttgggcggccaggtaaaggaggtgccattaactgagataagaaggagaaggagcatgtgtaaggaagaagacaatggtttgatttttgtcctttgaatttaagatgctggtgaaatatcttaactatattagagttttccagagaaacagaacctataggatatatagacatatataagaggagatttattttgggaattggttcatgcaattatgaaggctgaaaagtcccgtgatatgccatctgcaagtgagagaaccaggaaagctggttgtgtaattcagtatgagtctgaagacctaaaaacctggaagcgttgaggggagaactactggcctaagtcccaaaggcctgataaccaggaattctaatgtccgagggcaggagaagatagatgtccctgctcaaaagaaagtgaatttgcccttcttccaccttcttgatctatcctcagtggattggatgatgcccacccacactggtgagggtggatctttattcagtctactgattcagatattaatctcttctggaaacacacacagagatacacccagaaatagtgttttcacaactatctgggtatcccatcaagttgacacataaaactaaccattatactaactgtccaacaggcaattggatatagagatctagaacgtcagtaaggtatcaagactgaatacagagatctggtagttttcagtgtatcaacagtcttcaccaaaaacatctagaattattcctattttacagattaaaagcccatactgcatatctattgatgccatatgcccagaaccctttccttcttgatttagtaacagcctccatctttaaaaaatgaaaaccattaaaaaaccacttctcccagaccgtaggtaagtggtttgggtggagccagtgtcatgtcctatgcctcccaaggccagtgacccaagctgaccattatagtaccttacacttctggccacagtctcaaggtgacctgatcaaaagaatgagaatcttgagtagatttttgtaaactataactggtgtgaaggtctccttcctctcatagcaaaactgttcacatgtctgcaccaaactactaatatacaacacagacaggcagaagtgcagtgggagggaatcaaactgaggtccatgagaagcagagaggaagcccagttgcagtaaaaccttggttcccatgtgttctactatgcccctgcccttctagttacatcaaccgtgaatccatcccaggggccaagctagttcaacttgagtctttgtcccaagtaataaaagatgcagaaattgagacttgaatagtttaaatgacttgaccaagataatactcagacaagtaataggcagaccttcaaatcaaacccagggcattctggccactgcatggtattgccaagtacagggttctaaagtgatgcccactttctggctagaggagaatctccagactatgtggttgagtgaacaactacaacaaaaaaaatagtcaagacccgggttcaaatttggacaagctcaattactgcaacattaagcaaatcaattactctttttgaggcccacttataaaatgaaataatatcgctcctgctcactctataggtgtttggttaattaaggatgttaatacatgtgagagcattttgaaaacagtaaagaacctgccccaaggtaagtaatgctaatctctatcagcaatagaaatgtgtattgaatctattctctctcttgttgctaaaacctacaatcttaggggtgggaaacagaaatcaagaatgttatctcatccatgttaatttccatctgaataaacagtcacttctgtgttattgttgttactgaacatttattgaaagccagacagggtctgggtgccctggaaaatacaaaatctagagaagtgtctgggaaaggcaggaaacccagagcaatgcttggcatggtacttgggaacaagaaaccaaatgtgtggttcccaagtccccttcagaattaacatagcactgtgtccacattactgagcctgttctgcactgcctatttccactccccactctcatggggcatttttggagactggtaagataattcagtatgcaggtcttgggggacagagtatgatgttatgtaattaggcttgactctgtttattgcagacatcacttcattttgaaaacagaaatctgtcttttcctttggagcattttttataacatcataaggatgtcagtgtttctctttgctgcacaggtatactgtgcttagacgataggaaatttttggcctgaaaatgtacatgtaaatcatatttcatcaaaatcaaattacatccaaaatacaattgaggcgttcactatttctggggtccctgtggaaaatcatacaagaggcaatactgcatataggaaagaatggagggtgggagccagaaaatcaaactgaagccccagttcaatctcttcctacctgtgtgacttttggtaagtcttttagcctctgcccaacagttttcacatctgtaaaatgaagatgccatgaggttggtttttttttttaacctactttatggattttgtgaggacccagtgaaatgttttagagaaggataaagaaaggctaaatccatatcctctaggatttcaaaccctcttcataaaaatccacttacaagaattggaaacaacacaggggggaaagcaaagggtatgaaaatgaagccattttaagcaacaagcgtattgccacacatagccagactccatacattatatttcttgaatgaataaaaagaaggtatagctgattctgccaccatttactattctgtgccttgggaaatctcaaacagccttacacttgggtggcactcacttattcttacaataaagatcaccagcaacctaataaaaaataactcattcttagagtgccacagttgcacaaatcacttgcatgccttaagtgattcatttgagaagtcttttctgtcacaagatatgtttctcagaatgtgattctcaagacaccagagtcagaattacctagattcatgtagcaaatgtagaattctagatcaagcccacatttgacaaattagaatctctggggatgtgtctggataatttgcattttcacacacacacacacacacacacacacacacacacacagatacacactaacccactcctacactgtaattccaaagtttgacagcaattttcaggtttccaagaataagaaaaactatgacatctttggaagaacctggctcagtaaaagttcctttaatctcctcggcctttttttttttttttttgtctttgctaaatgtaataaacacttctagtaagtcctggaaattaatcatgccataaaaagttaattaaaactaacttaaacctataaaaagaatcagtccctgaaatttacacatgtacactgtacatttattatgtaatttacacatgtacactgtgaagcataatataattttttttgtgaatagctttttcatctaacaatatatcttggataactttccatgttgctacttatggatctatatttttctttctttttttatttttttattatactttaagttctaaggtacatgtgcacaacgtgcaggtttcttacatatgtatacatgtgccatgttggtgtgctacacccattaactcgtcatttacattaggtatatctcctaatgctatccctcccccaggcccccacctcacaacaggccccggtgtgtaatgttccccttcctgtgtccaagtgttctcattgttcaattcccacctatgagtgagaacatgcagtgtttggttttttgtccttgcgatagtttgctgagaatgatggtttccagcttcatccatgtccctacaaaggacatgaactcatcattttttatggctgcatagtattccatggtatatatgtgccacattttcttaatccagtctatcattgatggacatttaggttcatctactgtagttaggtttgctactgttagtagtgctgcaataaacatacgtgtgcatgtgtctttatagcagcatgatttatattcctttgggtatatacccagtaatgggatggctgggtcaaacggtatttctagttctagatccctgaggaatcgccacactgtcttccacaatcgttgaactagtttacactcccaccaacagtgtaaaagtgttcctatttctccacatcctctccagcacctgttgtttcctgactttttaatgattgccattctaactggtgtgagatggtatttcactgtggttttgatttgcatttctctgatggccagtgatgatgagcattttttcatgtgtctgttggctgcataaatgtcttcttttgagaagtgtctgttcatagccttcacccactttttgatggggttgtttgtttttttcttgtaaatttgtttgagttctttgtagattctggatattagccctttgtcagatgagtagattgcaaaaattttctcccattctgtaggttgtctgttcactctgatggtagtttcttttgctgtgcagaagctcttgagtttaattagatcccatttgtcaattttggcttttgtttccattgtttttggtgttttagacatgaagtccttgcccatgcctatgtcctgaatggtattgcctaggttttcttctagggtttttatggttttaggtctaacatttaagtctttaatcaatcttgaattaatttttgtataaggtgtaaggaagggatccagtttcagctttctacatatggctagccagttttcccaacacgatttattaaatagggaatcctttccctatttcttgtttttgtcaggtttgtcaaagatcagatagttgtagatgtgtggtattatttctgagggctctgttctgttccattggtctatatctctgttttggtaccagtaccatgctgttttggttactgtagccttgtagtatagtttgaagtcaggtggcgtgatgcctccagctttgttcttttggcttaagattgacttggcaatgtgggctcctttttggttccatatgaactttaaagtagttttttccaattctgtgaagaaagtcattggtagcttgatggggatggcattgaatctataaattaccttgggcagtatggccattttcacgatattgattcttcctatccatgagcatggaatgttcttccatttgtttgtatcctcttttattttgttgagcagtggtttgtagttctccttgaagaggtccttcacatcccttgtaagttggattcctaggtattttattctctttgaagcaattgtgaatgggacttcactcatgatttggctctctgtttatctattattggtgtgtaagaatgcttgtgatttttgcacattgattttgtatcctgagactttgctgaagttatcagcttaaggagattttgggctgagacaatggggttttctaaatatacaatcatgtcatctgcaaacagagacaatctgacttcctcttttcctaattgaataccctttatttctttctcctgcgcctgattgccctggccagaacttccaacactatgttgaataggagtggtgagagagggcatccctgtcttgtgccagttttcaaagggaatgcttccagtttttgcccattcagtatgatattggcagtaggtttgtcataaatagctcttattttgagatatgtcccatcaatacctaattttttgagagtttttagcatgaagggctgttgaattttgtcaaaggcctcttctgcatctattgagataatcaagtggtttttgttgttggttctgtttatatgctggattacatttattgatttgcgtatgttaaaccagccttgcatcccagggttgaagcccacttgatcatggtggataagctttttgatgtgctgctgggttcagtttgccagtattttattgaggatttttgcatcgatgttcatcagggatattggtctaaaattctctttttttgttgtgtctctgccaggctttggtatcaggatgatgctggcctcataaaatgagttagggaggattccctctttttctattgattggaatagtttcagaaggaatggtaccagctcctccttgtacctctggtagaattcatctatgaatctgtctggtcctggacttttttggttggtaagctattaattattgcctcaatttcagagcctgttattggtctattcagagattcaacttcttcctgatttagtcttgggagggtgtatgtgtcgaggaatttatcgatttcttctagattttctagtttatttgcgtagaggtgtttatagtattctttgatggtagtttgtatttctgtgggatcggtggtgatatcccctttatcattttttattgtgtctatttgattcttctgtcttttcttattagtcttgctagcagtctatcaattttgttgatcttttcaaaaaaccagctcctggattcattgattttttgaagggctttttgtgtctctatctccttcagttctgctctgatcttagttatttcttgccttctgctagcttttgaatgtgtttgctcttgcttctctagttcttttaattgtgatgttagggtgtcaattttagatcttttctgctttctcttgtgggcatttagtgctataaatttccctctacacactgctttaaatgtgtcccagagattctggtatgttgtgtctttgttctcattggtttcaaagaacatctttatttctgccttcattttgttatgtacccagtagtcattcaggagcaggttgttcagtttccatgtagttgagtggttttgagtgagtttcttaatcctgagttctagtttgattgcactgtggtctgagatacagtttgttataatttctgctcttttacttttgctgaggagtgctttacttccaactatgtggtcaattttggaataggtgcggtgtggtgctgagaagaatgtatattctgttgatttggggtggagaattgtgtagatgtctattagatcttcttggtgcagagctgaattcaattcctggatatccttgttaactttttgtctcattgatctgtctaatgttgacagtggggtgttaaagtctcccattattattgcatgggagtctatgtctatttgtaagtctctaagaacttgctttatgaatctgggtgttcctgtattggatgcatatatatttaggatagttagcgcttcttgttgaattgatatctttaccattatgtaatggtcttctttgtctcttttgatctttgttggtttaaagtctgttttatcagagactaggatagcaacccctgcctttttgtttgcttggtatatattcctgcatccctttattttgagcctatgtgtgtctctgcacgtgagatgggtttcctgaatacagcacactgatggttcttgactctttatccaatttgccagtctatgtcttttaattggaggatttagcccatttacatttaaggttaatattgttatgtgtgaatttgatcctgtcattatgatgttagctggttattttgcttgttagttgatgcataatgtaaatgttatgtattatgtgcctaatcatctgctggttcagttttttaatatttggattatttagtatctggttttgtttaacggaacaggactgtggtcagaacaatggcatggtcaaccgggatgccctccttctgcaagatagggaagggcgggtgctacatgactgtgggaaccaggtgtctggcaattgggatggtaactgtcaagaaatgcaagtgtctgaggctttaccctactggcaagctaacttgttttatggatgctgttagaagatgcaagattcctggatcagggaaaaggattttattacctaagccacaggaagcagcatgaacttcatgcttgcatcagtttcccttgcccatcaggtcacacaggggcaaagtagagattcccaggttggtgctgtatacactatgggtttctatcacagttgagtaatctcaagcttaggaaacccaaatcttataatgggctgcaagcaaacctgcttaacctttgctccagagagagacatactgaacaaaagcaaagctctactctggaggaagacactatctcttttttccaagacttttcactataaaacatccttggaaaggttgtctggaacaaagggctgtcagtgcctctgttcactagctgtgcaagagatgtatgtagaagtagaattaccttcaacagtgacttagcaggttctgaaaaaaaaacctggagtcacgaaatatcagcccattttatcattcatctgcaccaaaagaaaatgttggtgaaattaaaatttaaaaacccaactctctactccctccctttcaaaaaaatttaagcaaagcatgcagcctggtacacagtaggcatccaacaagtgctgatacccattctcaggctccccacacatatcctctcacataattttggtgctcatttattcttttctttgacatatgctcttattttcattgttttcatctttataaaaaatattgatgttgcaattatgattcgcaaaggaatatgtcctagatgaccatatttataacttccccaaaggtccaaagaacttttttggatgttttgtactggagttggtcttgagtttctgcacatgtgatacactaggtggtgctaattgactgagctgagcagggacactctttgcagcgacgttaaagactaaacctcactgaatagatgtttttacagacgtcaatcaaaggaggaaatctcaattattaataactgcacttcttgaagatataaagagaaaatgctattaataacgatcatggtcttttccttcccaaattatttataattacctgctttgccaaggacagaattcagctctaattctgcagacattgtcaggtaattgttacgttcaagaaaagctctagcctgagtgaaatctcctaaactagaaagttgcctttcctggaggagcaacaatatggagaaatgctttgtagagcaaggcagaattttctttccagacccaggcaagctcaggcaagaacctaagactacagccaggtgtaggggaaaaaaattcctcagctggtctagatcaacaaaccactaaatcactaaactaaagggctcctttactaatttgtcttacatggtcagaaacataatttcaagaaaaagaaagtctttatttgaatttattgttcagactaaaagcgaattaaccagcaggtaatccagggccaatatgaaacataaaggaagatttatatgaatcatacttcctctgcattgtattacaggagaaatatagttctaatttgtaaacgttcaaagcatttctgacccttaaataactccgatttataaaagtaaacacacaagccagcttttactgtctttgtcttttatgagtgccgatgcattaggcagcattcttgcaatgccacaccaatgtgcccctaccaagtaaggtcaaaataataactgttccaattctttttgttgttttttttatagagatggaggtctcaccatgttgcccaggctggtctccagctcctgggctcaagtaatcctctcacctcagcctcccaaagtgctgggattataggcatgagccatcacacccagcaactgttccgattctcaatgacacctctgtctagtggaaatcccacaccaggtctttagttctccattatataagtcatgaaactgtctttatgaatggctgcacctggaagtttgatgcctgaaggtttttttatgtaaactggattatatttaagtaaagatatccaccccatagctgcaaaggactgtcatcagtgaaaggagaagttaaaaaaaaatagaaaaaaatatatatataggtagatataaattattggtaatattttagttctcgaatgagtagcatccattatattctaaaagcataaataagcaaataaaataagaaggccattcatgaaacaatgacaataatattttatgaagcaaggactataattaatccaattctatgtacttaaataaataaacagaataagtcaaaggtagcataacattccacatccatgtgacccaatgcctaaacatctgcctgtaactactcaactcagtcctgggaaataacgtgggcaaaaataattcagaatcaggatgtctggttctcccacattggtgggaacttgagtgaggaacagtcacgctgataatcttttttttttttttttttttttgatacagagtctcgctctgttgccaggctggagtgcagtggtgcaatctcggctcactgcaacctctgcttcccaggttcaagtgatcttcctgcctcaacctcctgagtagctgggactacaggcacgtgccaccacgcccatctgtatttttagtagagacgggatttcaccatgttggccaggatggtctcgatctcttgacctcgtgatctgcccgccttggcctcccaaagtgctaggattacaggcatgagccactgcgcccggctgcatgctgataatcttacaaggcttcaggtcagagtaaggggacaggtgcctccttcctgaggaatgaaaatgtgcaaggatcagaagaaacatcagaagtcatgtcctggtgttatgggatctttggggtgtcaattttctggccagaaacctctgtggccacagcacctttgcccaagctcttgtcctgaatccaggaagaatgaagtatgcagacaagtgaagggtgaacaagacaaaaatgagctttactgagtgttacaacagctcagaggagacctgcagtgggtagctcctctctgtaggcaggtcatctatggagttttcagttctcagcagagaggtggccctggagaggatagctcctctctgcaactggtcatcctgatgtctgcagctctgcagctctcccccagagaggaggccctggagatgacggctcctctctgccagcaagtcgtctctgcagctctcagcagagaggataactcctctctgcaactggtcatcccatcatctgcagctatcagcagagagaatagctcctctctacagctggtcgtcccatcctctctttctctcccctctttgttcctctggccatcctctgccctgctctggctgagcccagggcttttatggacctcagaggggaggaagtgtgtgcctattggtccatgggcagccatgggtggtccagaagaggcaccacgagtccccactcccatccacaggactggcagcccagatccaagccttcaggcccttcccagcctgaaggtggggccttaatgcgggctgcccccttccacccaggactctgcctctcgctgccattcaaggcccagggctcggccccaaccccactcagatatcccagcagacactgggaaaggagaagggagggtttttcctggggcccccaaggtacaggctgcagggatgccagggtcctcctgcgcctaggagagcgggagctccagccccatcaactcggaaatgggctgggctcctgcttgtcccggctcctgctccatgaaacaggaggcccaggtctgcagcctcgggtctggctgctgcagctgcacccaggagggcagatcctgcctgtttccggcccccacccaagatcactgggaggctccgatccatagctgcagtttgggtggctatagccccacccaggagggcaggtcttctgcctgctccatagagcaggaggcctgggtctgcagccacaattcgggcaggggcagcggcaccgagggagctcccaccccaactcagaaagggcgtggctcccacccgctccatggagtgtgcagccccagctgctcctccctgctgcagccgacgtgatggcagcagccactgccatcactggaagaatgccaagttcaaagtctggagcttctacagcagcaccttaagcaagagagttatacaaaggtcagtgatcccagtatgaggtcaggagagtaaagaacagatataaggcatcctccctgcaagagaccctctacagccagaccctaggagtataatggcaaaaacttgggactaaaggtaagctatagagagacatggctcagaagatgagaaaaagcattctctagctttgctcaaggttcacaagcaaacattttctgtatcaatccttgatgttaaaggccttcttaaaacaaaagagcatactttagttctttcagtaagtacagtgtgataatacaatctaatacctttgattcattattgggagcattcatctatttattcagccaacatttacctattctgttcttgggactgtgttatgcatcagtgtcagtgtaaggaaaatagaatggagccacagaagttaaacaacattggaccttatttgttgttatcctccaaatgggctctgaatgtgactttaatatctctgataagagcctttcctagggacattttcctagtaacaattttaagtgtttaagataatgtacattaaagtgtctggccagacatgtggtaacatgtggctctagcttgtgatcccagcacttggggaggccaaggcaggaggactgcttgagaccaggagtttgagaccagcctggacaacaagtgagatcctgactctaacaacaaaagcaacaacaacaaatgtctactgatttggcagtcctggttaatttaggatctattacatttcctgtactgtacttgtcccaaatgtaaaagcctaaaaactcctaccttcattacactgacttcttgccagcagggcacccgaccccccttcccaagactctagaatgctacagatgctaataataatgccttgaagtccaaaacaaacacattagcaaggtcctggaagtgtgcaatgaaagctactagggactttccatcctgtcaagcaaattcatcatagcccagtcagttatcaggttaagcataattctttgatgagcttgttaaaggaaaataagtaaattggaggctattcaaagtcaggggctgtgttctcaacttctttgtaattccccacagtaaactagtataatgcttggttgacagttattcctcaattaacaattagcttttgttgatttatcccttttatttttcaagcatagaataagggataatgggagttatatgaacaacaggatattcttgacacactttcctagaacatcaaattcactcaaagatttggagacataagacattttttttttaaagtacaatgcaagaatctaaatgaatttttaaaatatgaaacaaagacaatccacacttatggctgggtatctgaagacataccttcaggccccaggtgatgattgtcactttttctctttagtggaaaaatctgcagcagactgcttgatgcctggtcacacacacacacacacacacacacacacagaatttgcctccccctccacccaaaaagcatatatttaaacctacaaattctacttttaggaacttaccataataaataagaatgcaaacacaaacgatagcagctgttcacctataattacttttatagtaaaaaatgttgaacattgtaaatgtcgctcatttagagaatggtaaaacaaattatgggaatgccatctaatgaaattctatttaaaataatggtgcagatctacatttattaacattaaaagatgtccacaatatgctaaatgagcaaatttaaaaataaataagatctcaatttgttttaaaataatgtttaaaagatatgtgtatgtgtaaccatgtatacacatattcagaaaaaagtctgtaaggctatgtaacaaaacaataactctttctgagggctagacctacaggtgattttttcttttttgtacttttctataaacataatttcttacatgaacataaggtaattttaaaaatgaagctattaaagaaatttatataatacaaaaagtataaagaaagaaaaaaaattattcccaaatcttgccttctaaaaataatcattttttaatagctaaaaataactgattcattttatttatttatttatttttttaatggtaaccacaaaatacactttttttttctggttttagttctttttttttttcttttttttgttttctttttttttattatactttaagttttagggtacatgtgcacattgtgcaggttagttacatatgtatacatgtgccatgctggtgcactgcacccactaactcgtcatctagcattaggtatatctcccaatgctatccctcccccctccccccaccccacaacagtccccacagtgtgatattccccttcctgtgtccatgtgatctcattgttcaattcccacctatgagtgagaatatgcggtgtttggttttttgttcttgtgatagtttactgagaatgatgatttccaatttcatccatgtccctacaaaggacatgaactcatcattttttatggctgcatagtattccatggtgtatatgtgccacattttcttaatccagtctatcattgttggacatttgggttggttccaagtctttgctattgtgaataatgccgcaataaacatacgtgtgcatgtgtctttatagcagcatgatttatagtcctttgggtatatacccagtaatgggatggctgggtcaaatggtatttctagttctagatccctgaggaatcgccacactgacttccacaatggttgaactagtttacagtcccaccaacagtgtaaaagcgttcctatttctccacatcctctccagcacctgttgtttcctgactttttaatgattgccattctaactggtgtgagatggtatttcgttgtggttttgatttgcatttctctgatggccagtgatgatgagcattttttcatgtgttttttggctgcataaatgtcttcttttgagaagtgtctgttcatgtccttcgcccactttttaatggggttgtttgtttttttcttgtaaatttgtttgagttcattgtagattctggatattagccctttgtcagatgcgtaggttgcgaaaattttctcccatgttgtaggttgcctgttcactctgatggcagtttcttttgctgtgcagaagctctttagtttaattagatcccatttgtcaattttgtcttttgttgccattgcttttggtgttttggacatgaagtccttgcccatgcctatgtcctgaatggtaatgcctaggttttcttctagggtttttatggttttaggtctaacgtttaagtctttaatccatcttgaattgatttttgtataaggtgtaaggaagggatccagtttcagctttctacatatggctagccagttttcccagcaccaaaaaataatcatttttttattaggtgaacattattctgaaaagatggcaatcatctcaagtatctctatatacataaatatacctagatatgtgaattagctagataaatgatagctatataggcaaataaattaaagtttaataaactagaatcacatgaatgctacattgtcataaaaagcactaaatataagtattattgactttaaaagaaaaaaaactgaaatgcattaaaataattgtttgggttcagctaaacatttttatcaccatagaatattttgttttctaaaatatctctctaagattcagaaaaaattatagaacaaaaagtttcaattattaaataatgatatgtttaatatagacattatcaattgactctttcctaaacaagttaagaaaattagcaagctttcacttcttcccacatactcattttggttagtttttatttttatatttcaggctttataacatttacatttgcttctatagccataattcctacaactgttaagtcttagataatatctaaatgaagccaataatctccacctattcttttgtaatgtcttttccattccatagctctatatttttaatttattctttttttttttttttttttttttttgagacggagtctcactctgtcacccaggctggagtgcaatggcgtgatctcggctcactgcaacctccgcctcctgggttcaagtgattctcccactttggcctcccaagtagctgggattacaggcgcccaccatcatgccaggctaatttttgtatttttgtagagacggggtttcaccatgttggccaggctggtcttgaactcctgacctcaggtaacccgcctgccttggcctcccaaagtgctgggattacaggcatgagccaccatgcccagccaatttattctttggttatcggtattttatcaaatcgtcttttttctccaataagctttcatatgtgccatattcactgagttattgaatgtttaggaataactttctgttaccgttatgtacgaattacaatttggctggttattataccgtttggttatattttcttcccttaattgaatttggctatacagaatatatataagtaatatatatgcatatatatgcatgtaatacatttctatatcatgtgttttattacattttctgtgctgttttctactttagtgataccaaatatctttctgacataccagccttttcacttctatattatcccttgtctaattattttaatgtattttttgcactgattctcttaagtctttcttccacatcagtaattctgttttaagccgtgtctaatctgttcattaccatataaattagttctataatggtgttggtcttctgtttttttttcagctctgtgaattctctttcatttcactctgctatttgagagcttgttatacctgtcatgttcttactaaatccttctatatacaaaacactcaagaatgttttttcattttgattatatttttttctagagaagtttctttctagtctttcactgtcatattcctttttctccttcaaagcccgacttcttaaagatctccacttgctcaattctgactcactcctaaaccatttcaatttgtttctgacccccctattccagcaaaaactgctctcagcgggtcaccaatgacttccttattgttaaatacaatgaacttcagtctcacttgtacccttggcagcatttgttgtggctaatcactccttccgctaaacactcttcccttggcttccattacaacacaccctctggttttccttctacctctctaattacttctcagcatcttttgtggagttttcttcctctgcttttcccttaaattttctgttctataaggattatgctagaatcttgactcattctataaactctcagtgtttgaatctatctactcttctggcttaaattacatctatacacagcttctaatttatagctccattacctagtgtctccccagtgtatctatttattggacactttggtcaagtcctaaactgaactcataatcttctattcccaacctgctcctcctcttcagttttctgcttctctaaaaagaaactacccggttgttcaagtcagatacttgggggttatctttaactccttgtttttcttctcatagttaaccatcaggcctaatgattttaactcctaataaaattatcttagctactctctatcaccactgccattgcctatctcaagtaactatcttctatttccagttttactgcaatagtctcaaactaattttctaaagtggttctactgaaattcaaatctgatcatgccatacccagtaccccttaaaatctttcaataactggccattgcctatgagatagcctccaaacaccttaacctggcataaatgacccttctcggttacagtctcttgatacttctccaatttcattttctgtttcacatatatgttccggtcaagataaactacttacagttcactaaaaataatcaggttctctttcagctttgcatgttattccatctactttaatcactctcactcctcccattggcctggctaagtcctaaccatctttccactcttaatttagaagttccttcttctaggaaactttcttggattcccagtttcaagttaagtatccccctcctaagtactctcacaggaccttgaacttctttaacacattctgccataacaaagttgcctttttacttctctagaaactagactgtaagtatcaagaggtgggtatggtgtgtatcttgttcacgattgcatccccaacctctaaaaaagaatgatttttgaatgattgaatcaataggagaatgtagctttacagagaaagagaagcaaactaacatataaactaaaaatgcctcttccttagagaatgaaggaaaggatgaaagagtatatgccttgcttttgttagttcttgacagaaaatgttaggcttaatcaaatggcatagcctcaatacttggccattttttacctacaaaaatgacaatttaatacagctcaacttaatacattttgatggtttgacctacattcacaaactatcaaacctggagaaacccagtatcctgataccaaagatgaaaggctagagccagaccactaatctttaaccccattctcttttaatcagcaaattttgagaaatgaatgaagtataaatattgatgcataagacaggactgaaacatttgaagttgaaccacttttagacaagacatgcactgaactgggtggcctaaattctgagacaaatgtttctgatttccctgggcgtagccagagattaagccgatatttttctttaaaagactatcattcatcttcgactagttcatgggaaaggaagcctctttagaagaaggtacagcgactggttaacatacaatgtattcattaaaacctcatatgccaactggtgcttaataactactttaaaaaatattcatggtgacagaaatggaaagatttagtgccttcatatgaataaaaatgttcagattctttattaaagtttgctttaataaagtggcttcttttttaggattgttattcccctaccatgtatactaatacattcaagaaaggtagagagaacttaaggtatgttctatttcatattcacctccaataaaaccactaaattggatgaaaactagaattgtcacttattctctagcaaccaaataaattttataaagctagacattggtcctaaattttctttatatcatcttttattgttaacatggttaatctcttctcaaatagggaggctatgtatattaccaaaaaaaattggagcaatgaaaaaaaactagtgaaatcaagcaatagccaaactggatcatttatgctccaaatgttcttttcatccgccagtgttttttctccagacataatcttccacataagtacagccttatgctaaactgacataattccaatgttactagttggttttgtcaatttagtagagtaaaatccagtaatttgggattaatgaaacaactaattgaactgttacttttcactggctgtgttaattcaatgtgatacaacactgtcatatgatcaggtcaaacctagaaagaattcatttgctctaaaaagtgggcaattcacccataagcacagagtattattatagaaactttttcccctatgatctaatactagacaatttgagccactgtgttaaattaacatcaaaatatacattcagaccagaatggtagcttacaaagatgaactcttttctctcttgttcacttttgtttgcctagtgcctacattgtaagcattcaaataatatttgttgaatgagttaattaatgaaaattattatcatcagttgcctatcctatccagacaaaacattttgtctatagaaaatatgaccaataaataacattctatgtgtcaggatctcccaacataaagacttctaggtaattacaaaactgaaaagcactgttagccccagtactgatttgggttccagtcagtggcttccaaacttagcatgcatcacgctagttaagaactagttaaaatacagattgttgagccccaggcctagagtttctgttcaacagggacctgataatcctcatttctaacaagttcctaagtgaagctgatgcttctggtccagagaccacattttgagaaccgtgaattaagaaaatcagagcacttactaagaatagtctttattttgctgatgatatattttccacaaaaatcatgtctacaagtagtagatttcttttttttttttttttttttttttgagacagagttttactcttgttgcccaagccagagtgcaatggtgccatcttggctcactgcaacctccacctcccgagttcaagcaattctcctgcctcagcctcctgagtagctgggattacaggcacgcgccaccacgcccggctaattttttgtatttttagtagaaacggggtttcaccatgttagccaggctggtctcgaactcctgacctcaggtgatctgcccaccttggcctcccaaagtactgggattacaggcattcttgtacaagtaacacaaccttatcagttctctggagtttactttgtattaacctcaatgacatccaacagtatcttattagttcaagtagaacctgtcaatttgatggaaagaagcaactctgcaagcacatcattcttcttgacactacaatattacccaaaaattcctagtttaaatttgctttaataggcattatttcttatactaagtttagatgcctttcctactataagactatctagataacatttgttagagaaagcattaacaaactttgttgctcttcatcaaactgaggtatgtatgccaggccaggcatattaatagtaaatacctccaaatgataataacaacctatatttgacaaaatgttggcacactggcaaaaactacatttatagtcatactgtttctagcttcatctttggagtctagccattgagacacacctatctttgttaaagattttacagatactcataaaggctaaaaaatactcatcttttagcaaaagcacaacctcttgcagattttggaagcatgaatctattaatgcttttttaataaaagaagtattaaagagaggtaggatctatagctgctctagtgggaaacttaaaaagtaattaaagaacaatcaatcagtagatttactaacccacacctttctctgaaaagtatcactttattttgaagccttatatatctcaatagaaaagtgaaatagagaattgaacatttagtctgtcagttattcaacaggacctcaatgtaggggtgtgtgtgtgtgtgtgtgttggcgatgggggacatgcctgcaggaatgacatcattctgcttttctcctcaaaatattacctggaagaacatagctttacattaaccatgccaacacccgctcataagagtcctccctcctacccagggaaaagtgctaagcaagaaatgatttgctttaaatactgccaaggttgagtatctaaggactggttcaagttgcacatccagcaaggaagcaggcttgaggcaagtacaagcatctgaggaaaacacaggaaggctttttgacaaccccgttggggattttttcaaaaagacttgcaagatgccaagttaatcttgaggcttcttgcctcacttccttttatgtccttccctgaacagttcttgtataaacttgtcctcgggatgtctttccgcctcctataaactcccacctctgggtagccttggcacctctgccttaccccaaggccttgaattacttgcctatttccacatctccatgctttaaaaaaacttcccttcaaggtaggaatgcaagatacaccacattctcctttctgagtcagatggagatggtggtcatttccaggccaagtcgactttcactcaggctatatcccctttttcacagaacttcctcccctctggaaatgaggataaactaccttgacaattaattacctggagaaggccaagtgagagactcaatcttttgaagaaccagttcccagatcattttgatttggagcaaaaccctgaaccgaatccacagcgagaaaagccagcatgtcatgctgcaagttgcacttctccaagtgctgctagctaccaatatgtcttagtctgctcaggctgctataacaaaataccacagactggatggcttacgcaacacatacttgtttctctttttttgcaatatggataagttgagaattttccagtctgcaagttctgcttctggaattgcttaacaattccttctttaattcatctctgtcttctcatagtttactatcagtagtcaggaggaaccaagccactttttccacactttgcttagaaatctcctcagctaagtatccaatttcattgcttacatgttctaccttccacaaaacactagcacataaacacaattaattgaaatttttgccacactataacaaggattacctttcctctagtttccaatatcatgttcctcacttctcctgagacctcaccagaatggcctttaatgtccacatttctatcaacagtttatgattatttatgtattctctaagaaaacaaaaactttatctccagctttcctattttctttctgagcccttaccagaatcgcccttatgtgcacctcaaaactcttccagtctctacctgttgcccaattccaaagctgcttcctcatgtttaagtatttgttgcaggggcattctctccttgactccatctgaccacttcctctcccaatttccttgttccccaactgacagtaattctcttagttttccataatcactctctttatcctttcatctcccattatttgtggaacacactctagtctaactcttgtaccctgattccactgaaaccaatcttttcattggtaaagatctccttcttgccaaattcaagaaacaatttttaattttcatcttactcatcctctcagcagcatgagacatagttgattacttcattttattgaatcacttatttttgggttattgttggcttccacaacatatatttccctgttttatttcttatctcaccagctacctccttctcagtcttattcactgggtctttctattcttactgaaatggaaaaggtgaaatacccaagagctgagtcctcagatttctcttctttatttgctttcctccctaggtgatctcatctagagtcatggctttaaataacatctagtcaaaatcacatctcacagaagtctttcttcctcatcagtttcttaccctgttttgtttttcttcatggcaattatcagggatctagaactagaaataccgtttgacccagccatcccattactgggtatatacccaaaggattataaatcatgctgctataaagacacatgcacacgtatgtttattgcagcactattcacaatagcaaagacttggaaccaacccaaatgtccaacagtgatagactggattaagaaaatgtggcacatatacaccatggaatactatgcagccataaaaaatgatgagttcatgtctttgtagggacatggatgaagctggaaaccatcattctcagcaaactatcgcaaggacaaaaaaccaaacaccgcatgttctcactcataggtggaattgaacaatgagaacacatgaacacaggaaggggaacatcacacaccgaggcctgttgtggggtggggggaggcgggagggatagcattaggagatatacctaatgttaaatgacgagttaatgggtgcagcacaccaacatggcacatgtatatatatgtaaccaacctgcacgttgtgcacatgtaccctaaaacttaaagtataataaaaaaaaagaaattatatatgtatatatttaaacttatttattgtcttccccatgagaacaggaatcttgtttgttttgttctctggcatatcctcagaaactagaacagtacctggcacataacaggctcttaaaaatatttaataaatggatgctatgaagaggctttcatagtttttttttttaattcttacctcctaaaagataagaacaattgtttcagtccctatccaactccagttgtgcaccagatcttgtcccctttcttctacttaaggactttgctcctgaaatcatccactttctctttttgcatcatcagtcttctctttactcatcatactttctttatgctacaatatgtcccattatacttatcatgttttcctatattatttatatctttattgatttattttctcttgttcccttataatgtaagcaatatcaggacaagtacattattttattcactggtgtatccccagcactagaatagtagtagcaagcattcaatagatgttctataataaatcaaatggatttaaatactggtttgcttatatgtctctcccactagaagctatgttcttttaaaataaggaccacgttttattccatttaaatcccctttgcctagcacaatgcctagtaagtgttcaatctatttatgaataagtgtataaatgagtatacaacttaacagcaagcatgaggatgttcagtagccctcaggaaagatggctaacaaaaagttgagactgtcattgtaatgaaaaaataaaaagtctattgaaataatctgggctccagagacggcaggagactcagaccaactaatcttgggattcccttagctagagcaatggtttcaggtatggacctccaacagagtcacaccttttaggacaaagacaagtgtgttcttgtctcctggaacacaagctgagaggatgtctggagtccctgccaccatctgactaccacgtaaaatctgagactaaagaaaacactacagaagatagaaccaggaaatagagaaaccaaattctgaaggtactgcttgagctctgaatttagtactgccttaatttagtctactccctagactttttaattatgtaagtcaataacattgttttttgcttaaactggtttgaactgaggatttcgtcacctgctacagaaaaaaaatatttgactgattctagatctttaaaaattagattcctgggtcccaatgtcagatattctgaatgattatgtctaggccttgaaatctgttttttaacaagatccccaacagtatctattatgttctcggttgcaagcagcagaaataaaagtctagcagagccaaagtaaaaataatttaaaagacattagaaaagataaaaaaaaaaaaaggacattaggcagcttacaaaatcaaggaggtattaaggaggtatggaaaggaaggcttggagctacacagtcaagaacaaagcccaaaagtcatgctgccaaactcatcttgtgaagtagtcatgggtgctaccaaaaagcaccaaacattatggcttgtacaactgcccctaggagcttaatcttggggcaaccaccacttcctctagcattactgccactgctaccctgctatataacctagttatccaatataacctatataatctagtgattcaattcccatgtgctaaaggttagaacaacctgaaagaaaattattatcctcacatgtactgggaatttgacataatatatggcatacttaccgaaaagttggtaaggaaaattttttggaatcttatagtagaattaaacatgaaaccctttttctataacctgttgtgtctttagcatgagggtaaaagattttcctctcctctcacagggacatttgtcctcagcaatgctattcaaattaaccgaaaagctggtaaggaaaattttttggaatcttacagtagaattaaacatcaaaccctttttctataacctgttgtgtctttagcataagggtaaaagattttcctctcctttcacagggacatttgtcctcagcaatgctattcaaattattccagccaaataacgtcccatttctgatgatccattgccttgcattgctatttgtctatatttcctcacagtcttaacagaattctgaaaaaaagtgagtttgacctcctcattaagctccctactatggcatgtgacaggcatgctccctgtttcctccaacatgcaacccgttacccactatcagctttaagccagaaacatggtgaaaattctcaggtgatgggtcagatcaagaatgaagactttttgggcccttttgccacaacaaaatctgtttctcagtgtggcacctggacagccaacaaagtcccaggagaggaaccattttctcacatatccttttatgcacagtgacccacgtgctgattagtaacctgcaagcacttccttgatcactcacaatacttttggttataaccactgcctctaccctatacctcatttgattattgcatagtaccactgatggatgctgttgcaatccccctttcccctttgacagtttatttcagtggctcccacacacagctaaggctctgagtcactgtctgtctgtttttccattgcataagctcagaggagggctttgcaagtgtttgatgctggggcttttaccctcaccttggttgtatccctttggaacattgctagaagatatccctcctgagcactgaacctgtgccagccttttgtctcttttctgatctttgctctctgagtcctgggacttcctccaatagtctcttttgttatgtttgggttatattacttcatgtataattatatttgcatagttcttttccggtagtagcaagagcaaggggaggtctcctttatccaaaaacctgtgtctccttagagacctacaggaggctcgggatactctacaatgagcacatttcatatcttactttagtcaaactgcaagatatattagatttatcgaaccatagagacagaggtatctaggaggtttcttagttattttcccctgtaagaaaacagaaattcagaaagggaagttattttctcagagataaacagctattgacaaacaaatctgggactagaacccaaattcaggatactttcttctttactaatctgaattttcttctagagtttttcctttttcgaccatgtgtaacctttctgtaagagactgtctttgcatatagttacttaatgggtgatttaatgacagggaaagaagaatggaaatatccaagaaggctttatacaataatgtggtagacaaagacatccatatcctattccatagaacctgtttttttcttttttctttttctttgcttctaacacaccaagcacatatagaacctgttaatatattcccctacagagcaaaagaaattttgcagatctaattaagaatccttgaggtgggagattatcctggactatatgaaggggcccatgtaataacaaaggtcctttcaagtgaaagagacaggcaagagagtcagaatcagagaagaagatgtgacagtagaaacaatattagagtgatgggatgtgaggactcaaatcttccatcgttggctttaaagatgaaaggtgaacacaagccaaaaattgtggggcagccactataaactgaaaaggcaaggaaatgtattctccatgcctttctagaaggaatgtaatcctgacaatatttattttaacccagtgaactccctttggacttctgactccagaactgtaagataataaatttgtattgttttaagccaataagtttgtggtaatttgtcacagcagtagtaggaaatatggttttagaagtaaatctaatataaaaccacaataataatggttatgtcgcattttatatgtgacaggcattatgctacacccatagtgtccattacctcattaaatccttggaataattctaaggccagataataacattattcctctgttatggttgaggaaaatgagaattttctcacttgcccagccactcattagtaactattagagtgaagagtttgtcagattttcaagtgtatattcttaaccatcatgctatattttctccttaaaaatattatttgatctattttgtacaaaaagaatatccaagagccccatagttgacttttgcttcaggaaatgatgaagtaaccaacaccaggttaacccaagcacaacctaaagaaaacatgaaatgactgttttcagttattgggcagacagcacaatactgtgatcagcaagaaaagggaaacaaatgaggagagccctataatcatcctggatttctgtctgaagacaattctttttactgtgatttggagagtaggatatcaagctgagcatagcagtctttctgaattaagacagaatcagaattcaggaaaactgaagaacaaagtacgaaaaagaagtcttgtgtacaaggtctgtgtacagaaagacttccgaaaatatgcacaggaattctcttatttctgaataccaagtcacacttgcctaaagttaaatttcatgaggtatggaaaaagtgaccagagaacagtaagctgaaaatgtctgatcacaaaagggctgggaaatgtttgtgttctaaccatcagaatggggagttcttattaaatacctaggcattcagtagacatccagaaaggtgacacattaatgacaaaactaaactaggcttaaactaaggctattctaaaatcactctaacaaagcttataaagaattctcaaaaatgatccatatatatgcaaataatttaaatggctgctgaacaaagcccaacactctttaaggaatataaaaaaatatggtaaggaactggacatggtggctcacacctgtaatcccagcactttgggtggccaaggcaggcagattgcttgagtcctggagttccaaaccagcctgggcaacatggcaaaaccctgtctctacaaaaagtacaaaaattagccaggtgtggtggtgtgcacttgtagtcctagctacttgagaagctgaggtgggaggatcgcttgagcctaggaggtaaaggttgcagtgggccgagattgcaccaattcactccagcctgggggaaagagcaagaccccatctcaaaagaaaaaaaaatcagtatgctacaatgtaaagatcaaaacgtccaacattagtcaaaaattactagacatgccaagaaggaagaaaatgtgacccacttcagaagaaaaattgatcaactgaaacagacctgtaaatgacagaaatgatagaattaagacaaggaatttcaaatagctattatatatatatgaaagtatttaaagaaaagcaggaacctaacaagaagataaaatcaataaattaaaataaatgaaaactcctaaagaagaaaaagatagactccaaatgaaaaattctctaagtgggatgaagagcagaaaagaccctgtggaagaaaacatcaataaactttaagtacagtaacagagactatccaaactgaagtacaaaaaaaaaagacagacaaaaaaaaaaaagcctcagtcatctgtgacaatattgaatgggctaacctaagtgtaactgaattattaggataagggtttaaggatgtaggaaaatgtgatgaaatcatgaccaaaactttgtaaaattttatgaaaactctaagcatacagactcaggaagctcaacgaacaccaaagagaataaacatagaaaactattccaaggtatatcagaatcaaatagctacaaagtaagtgactaatagaaaatcttaaaagctaccaggggaaaaaagacatagtacatacagatgaataaagataataatggaagcagatgtcttgatagaaactatgcaaactagaatataacaaatggcatttttaaactttaaaacggtgaaagaaaactgttaaccatgtcttctatttacagcaaaaaatgtccttcaaaaatgaagacaaagtaaagagttcataagacagacaaaagctgagacaatacccagaagacttatactacaagaaacactaaagaaagtttctcacactgaaggaaaataatatctgatggaaacttgaatctacacaaaggaataaagattgtcaaaaagggtaaataaatgattaaatataaaggatactttctctttttttagtttctttttttaatagagatgtggtctcacttatattgcccaggctggtctcaaactcctgggctcaagcaatcttcctgcctcagtctcccaaagtgctgggattacaggcgtatgccactgtaccctgtactttattaacttcttcaaaagataattgaactaaagcaaaaaaaaaataactccatatttggggcatgtgatatatgtaaaagtaaaatgtatgacaactgcacaaaggacaataggaaagaaatataattatacttttataaagatcttacattatatgtgaggtaatataatgtgaagttagactgccacaatgtagaaatgcataggaaacactaaagtaaccactaaaaaataaaacagaatgcagcaaaatagggataaagcagaattcttaaaaatatgcacttagtttaaaataaggcagaaaaagaagaaaaatggtacacagaacctggaacacacagaacaaatagaaaacaaatagcagtatggagggacacagagcttcagagaccggtgggacaccagcaagaatactaacatatgcgtaatgagaaaagaggaaaagggcagaaagaatatctgaaaaaataatggctgaaaacttcccaattttgatgaaagacacatatccaagaggctcaatgggattcttgagtgtgaatccacatccaagcagctcaataaactccaagtaggataaactataagattcacagagacacattgcaatcaaatcgttgaaagccaaagacacagcaagaatcttgaaagcagcaagagagaagtaatctgtcataaacaaaggatcctcaataaaggtcaacagctagtttctcattagaaacgatggagaccagaaggcattgagaggacttatttatagtgatgaaaaaaaatgtcaaccaagaattctaaatatgacaaaactacttttcataaatgaaggcgaaattaagacattccctgataaacaaaagtttagagagttcatcacttagacattccctacaagaaatactaaagggattctttcaagccaaaacagaagtcatgctagatagtaacccaaagtcatatgaaaaaataaagaaataaagaactccagtgaaagtaactatataaatataaaaggcaatattattttatttttggtttataacttctttttaattttctttataatttaaaagccaagtacatgaacaatcattataattctgtgttaatgggtacacaataattttgtgacaataacaatataaaaaaggtggagctgtaaagaggcaaagttttcatatcaaattgaagctaggttggtatcaattcaaacgaggttatgaacataagatttttaattataatcctcatggtaaccacaatgaaaataactaaaaatatatacaaaaaaggaaataaggagagagtcaaaatgatacactagaaaaaaaaatcaacacaagacaaagtagtattgaaggaaattaggaatattaaaaaatggcatatagaaaacaaatagaaaaatgtcagaagtagtcctttcttatcaagtaatcactttaaatatcaatggattaaactcaccattgaaagacagagactggcagaacagattaaaaacaataattcaactatatgctgctacaggaatctcactttagattcaagacagtttttgtcctaaactagaagcaaatagttgttattcattaagatggggaatactgtatgtgggtatgtgaggcctgagaaggattagatttgagatatctatcagacattccagtgaagatactgaagaggttggatatatgagtctgaagttcaggggaaaagtccaacctggagataaagacttagagtcaccatcatatatttgctattttaagctctgggaataaatgaaatctaaagagagagtgtgtataggtaaaagaaaaggtccaaaacctgatttctgggtcatttcaatattaacagtttgggaacaagggtagaaatcagttcaggaaacacaaatagtggctcatgaggtaggaaaattaggaaagccaaatgatgaaagtgttttaaggaaaacatatcaattctactaaaggctgctctgtcattttctctcaggtctggtgtgggacattctctcgcctcataattgatgttttctcctcagatggttgtttgttattcaacctaggggcttgtatataagaaacagtcataatgggttactcatggttctaattgtgtgtgtgtgtgtgtgtgtgtgtgtgtgtgtgtgtgtgtgtgtgtgtaattatagcccgatagagatagaatgggaaaatcatagactatggaaccagtcctagctctaccatttccagctctaccatttccatacagctatatgaacttgggaaaatttcttaactacttaacttctctcagctccagttctctcagccccttgggaaaatttcttacctcctctcagttccttgtgtgtacaataagacgaataatattgcacctatctcatagtctactgtcagaattaaatgactttctatatgtaatgatactataagatctgaagaaagattaattactagtcccttcctgacatatgagaagatacccatgactttatgttccctcagctgctgaattgaatatcagctgctgagcggccttccttcctctggattataatggttttattttttacaattattctaaatgctaatatttagaaggtaattattagacttgttctatgagaactccttttggaaaagtaaatattttttaaacaaggttgctttgacacaaaataggtgggaagggaggggaagagatgagaaaaagaaaaatataaatgggtccacttggagcaatgaagatcaaagtaactctttgaatgtaaaaagaatgtagattctaaatcaaagtccccttgccaacagtatcacagcttttatctccttttcttaactcctgttcatccaacctctttccatatcttttatccctactagcatttcttccctataacatgaaaaatgttacaattgctcttcccattccaaaagcatgaataaagcatgaggaccttcacatggaatttacttgctgtatatgtggtgatttttttgtttggattaagttgtatttctaatggagagggggtggaagtataaccgagtacccccatttttctaagtgaaagagagtaagttactttttaaaaattattttctcttcttttttctccatttccccttcttccccacttcctacttagccctctggaagtgcaattataactttctacctccttttcaccagatgctccctacagaacaagttcatctaactatgtacttagaagctccagaaaggaactctcccccacctggagactgcctcacaaaataacagtcgatttacacccacaatgtgtccaccacaaaattcgctcccaccaggagactgccttgagagataacaatcaatttacagcccaaagtacccctgctacgaaactctctcccacctggagagttttcaaccactcttacaacctatttctgcccatgaaaacaccagctgcctggcagataaggcactgaagtgagtatgtggaccactcccccaccaccctgctcatttctgccccttcataagctcccctttaaaagcactcactttctgctccaaaagcgaagccacacccttaaggcaggaagcctgtacttcttcccctaagctagtttcagaataaaaaatcactttctttatactagatctcgctcttgttaatcagactctgaaagcagagattgactgaacctgcatttcagttacagaaaggaaacgtaattgtaggcagagaggctcatgagatgaaaccgtctgacagccagaaccctcctagaaaactaaggtgattaaatctttaaggcagtcttctcaatctctttagaactgttttttttcaatatacctccttgcttacacaatttgaattaccaataaaaataaattgagaagaaaatgcattaaaatgctttatgatacactgtcagatcacaggaaggtcttaagtatgtcacaaaagataaataagcttcaaaaaactataaatattctatatccctgttgagtacagcttgaaaactcaagcttagtagtgcttaccagcttacagactcctgcatatcctgactgctgacctttaagcctatagtttctgttttgatcttaagatgatatagctgttcattagactcagggaactcccacagccctgaacaggggtcactaacgtaatctctcctttctctgccttatctccattataaatccaagatacctttggagatgaataggtatcaagttatctgacttaccttagccatacaagcatcctaggaatttttcctgatgatacaataagagtaaacgggctccaaaaatgcaatgagcatatgcaaagctttgctccacctttcttattttttccacccaacatttatcattacccccaaaatgccaaatgagggacaaaagagagataccaacagaggaaataaacttgaagagacattagaagaatgattcattgagataacagagaaaaaagcatatactccaggcagtttaagaaagttacctaatagggcataggttcaagatacccaacgtgagccaagaaaaccccctatgttgccaaatgtcaaatagcatcattattatcagtctcattgataaattatcgggtttttatgtattgtctgggaatttacattctaacacccctgagatgtaaaaagagagaaataaatataggcatgaggaaacgcaaggcaaatagctactcagaagataaaaacacttgtataatgcaggtgtcatgaagcaatcacactgcactacagaccagggagcgtgaatctacctcagaccgaccactcaatccaaaattactcaatgatattggtagtgtgtgatcatctgtatgagctaaagcattgttatgccaaggcacacctgtccacaaaatgacacctctatatttcacagatccaaaaagccactgtggaaccagagagaatgggaatttgtggtctgaattatctaacctgtgccagacttgttattccacttaactatgatgtaaactgttcagatgtatttagtttgccttattctttaaaattaaaaatggaaagtgtttatcgaaatgaagatccagaagtacctactgagcctatttcctctcagctgttttcaactgtaaaacacaaatatgtctaacattctttaaaattaaaaatgcaaagtgtttatctaaatgaagttccagaagtacctactaagcctatttcctctcagctgttttcaactgtaaaacacaaatatgtctaacccacgaagcctataatcattagcagctgggttgctgtgtgttgtagtcatgaaaatgctcctctcagacctcctgttggagacagcttaattgatcctgtccctctggatgcagcactgcatctacccgaaggccatacttcctagccaatgatagagcacagcagatactaaggcaggcccattctggcaatatacaggactcctgagtaacttctattttaggactcaccatcgacctggccaaactttcttagcactacatggcagtctgagacccatcctacccaatcctgctactttccttcttctttgctacactgtggttctgaagtttctctccacctcctcctgctccctccttcagtaatctctttcatatctaatcctagcttgagatttatttggaatgggtccaaatcaaaacaggtggtacacagagtggtgtgagaaaacaggcaggaagatggggatttgggattggctcactcacccaacattagattaagtgggggccatcttgtgtggtaggtagggtacagatagtccctggcccaaggtaggggcccaactgctcaagatttcacccacaatgacctgagaaaatgtcccggtggaagggaacaatcattcagttccaatcattcaggcatttgaaaaaacaacaggtgtgctggctcacacctgtaatcccagcactttgggaggccgaggcgggtggatcatctgaggtcaggagttctagaccagcctgatcaacacggtgaaaccctgtctgtactaaaaatacaaaattgctgggtggggtggtgcatgcagagctccaaagacgtctgaatgatccaccaaggtaggtctactatggtaaggtcagggccctacttgggaaaaactaggatccagaaaaatgagatgagaacatctagatggatgcctcctcaagatactggttatgaagatccccccgaaccttcagagcttgcaaaggtggcctacccatccctcgtaagtggaagcacctccctttgtgctagaaaatggtagagtcctgtcccctctagaaggaagtaaatgccccctcagaagctgccctttcctccccttggttacccagctgagcacctgatgggcctgataagaaagagactctataccaaagaagagcttacaagagtgagctagcatgcaccagcaggagccaggagcctaggattagattttaagtgtgcttgataaaaagggccagaatgtaagactggattgggtaagcagaaattcattaacttgaatttaatttagcttgaaggcacttacttgggacacaggatttaaagcctggcaaggatcccagagtatgaggaaaattcactgcttagaatggctctgagaacactgaaaaaagtgatgaccaacacggcaaagtgtaaatacctgagttgccctcacaaatgctagaggaaagaataaagaggctaagggaagcgggcaaggccaaaattagggtgaggcaagagcagtgtctaaggggcataattcaaggagccgctcactctcatggtcttgaaatattagggtctttgcctcatcctagtactggacctggaaatgggtatgctagagtgtatctattatgtaaggcagtaagattcccctagaggattgtgttcacaagaaagcctaccaaggccaccagaaatgtgctgagagggaaagcagtatcactaagaagtttggtagcggttcctctgcaggccagggctgattgtaggagaggccatcatagagctgggctcattagtattcatattcatgatagaggccccacaggaatagaggccaagtgatagcacttaactatcaaaagtcaggaggctgcaattaccataatggcctgcaagatcagagcagccaatgggtttgatccacagggagttgtggagatggttgataaagcatggttttcctaggagcaaaatagaagggcagtcagcaagggtgctacttaacatctttaaatttaaaaaaaggcaagaatgggagagcaagaggcagaggatagtcatacctataaaaaagtcacaatcctctgctaatattcccagacttgagcagatttttagaaccaaaatccattgactaaataccacagaaagtatattctataatcattcctacgacacccactgcaacaacttggcagttggagtaacccccagattaagacccttggcctatggagtaagagctatcacagcaggaaaaaccaagtggaaatctttaaaattgttcctcctcagccaacatagtaattcaaaaacaatatatcctacagatgatgaaggagattgttgctgtcattaaagagctaaaggaggcagagatggtggctctcatcatatcttcatttaattcactaatctggcccctgcaaaagccatctgtagactatcacaagctcaacaaaggagtatccctgatgatagctattgtgccagacatggttctactatccctcttctaaattcccccttagaaagagacccctaaggaaccacggaggagttgcatcccaaagctatgtgaagtagacctgtgtggaacaagggttagacaggagcaggcatgaaaatgctcctgtcagacctcctgttgtgaggagcataactgaccaacagcctgagatcttgtccctctggatccagcactgcatttgccccaaggacatacttttgttgtggggggtggttcccagccaattctggaccacctcagagatactaaggtaggtccattttggcaatatacaggactcctcagtaactttgattcaaggactccccatcaacctggccaaatcttccttggtactgcactgcagtctgagactcctcatacccagtcttcctttcttccttctcttctacacaatctgaaggatctctccaccttctcctccttcccccagtaaatctcctacttcttaatggacttgacctaatataccccgaaaacctggaagactatggaagaaaggatctgcatttgcatttcccctggcaaccagaatgtttttaaactatacaaggggatcacagacttacttatttctttatttttaccacaatgaaggtaacctgctaagggaaggagaatctaaagatgattaaaataaacctggaacaaaaaattgctttgtatcttaaaatttgcataaggcatagtcagggcacaaaggggctgatgcagcctcagtgccaaggtaaatgaggcacacactgtacagtattttctgtgttggtgccagtcacacaaatgggatctgcccagagctagtcttacttgtgttcctaacttgcctgaaaatgtttagaaattgtcattcctggatcagcacttttagtttgggtcttggtgccagtaacacctttaattctgtggttttcattcatatgctgttgacttgtgatgcatgcggcctcacccacagaataataaatggttccccagttctgttggagttaacctaggttagaagccatagtttggtggactctgctcagattagtcaggttcagccagatttgtggttgacttgacctaaaatgaaatgcaatgacctattcactttccagacatgtccaggattctaggagtggtccaaagttaatctgaatccatgaaaggtgtggttttttggaaatcacccagaactaagggatcctagggttattcttattcttggtgactaatgtacaaacgatttaatgtctctgtacattcatttcctaatgaatataataatccctccctttaagaaggttgtaatgtttcatataattgtatgaaatgccttgaaatctttaatgagaaaaggaaaaaaagttatcatacacaccatttttaatctaaggcaaaagaattcaatcaaatcttgaggcttaatttattaggctttctcaacttaattatttatctatactgaagtctgctgaatgcacatttcattggcacattttatttttcaagggtgtagcctagcacagtgacagatatttaataaatgcacatcaacttgcaagaagaaatgtggacaatttaacagagtcatcgactgagaatccagataccagggttctagttccaactctgctgctagtgcattatacaatcttccacaaatcacttggctttaattctctcttccgagattgagaacattggtgttaagcatctctaaagtaacattcaggcctttaaaaaatctgtcataatttgtgaagttgttactcttttatattgctctaatgatgagacactttttttaaagaagaaatataaagacatttataagtaaatactttcctattttatttttctcaaaatctgtgctgcattttaaaggcactgtggtataactcaaagagtactaaacatggcttctaaaaatggatttgctactaactacttttggggctttaggtagttcatttcacatttttaattttctaaaaactaaagactcagttttcttatctgtaaaattagggtgttggattaattctcaagactcttcctactcaatccaaggtctattccagccctaatatcctataactcatccagataacatttttaagtgtctgggttatttttctaattacaaaggtaatacctgctcacttaaaaatattcaaagaatacaaaaatatgccaggcacagtggctcacgcctgtaatcccagcactttgggaggccgaggcaggcagatcacaaggtcaggagtttgagaccagcctggccaacatactgaaaccccgtctctactaaaaatacaaaaaattagctgggcgtggtggtgggtgcctgtaatcccagctacttgggaggctgaggcaggagaaccgcttgaacccaggaggcagaggctgcagtgagtcaaaattgcgccactgcactccagcccaggcaacagcatgagactccgtctcaaaaaaaaaaaaaaaaaaaaaaaaaaaaatatatatatatatatatatatacagaaatatattaagtaaaaattagagtccaccataatgctatcccttagagattgtgttaacagcttattatataatctttcaaaattgtctgacatactaacatagatgtattattacactattattttataaaagaagatatatatacttttatgatttttttaatttaataatatatcatgaacctctgccaactagatatatgtagctctatctcattctttttcatgactctgttccattcagtgggcatatcaagtttatttacctgctaatgaatatttaaatggttttaaaatttttgtaatgggtatgctggatcacctgaaggcatctttgcctatctatttttgtacaaatttggaagtactttctttaaggtaaattcctataatggaatttcttgatgaaacagtgtaatttcctatgtaggggcaaactgctctagaaagaagtgttatcaatgtacattcccacaaataatgtacgagaggagaacactaggtggtgctaagcatgctaatttatatttattatgtcgccggaactggtgaggcttattatctagtttgggccttatccccaaataaaactagactagtgctgatataaaggatttcagatcttaagtcaggtcttcctcggtctcccgtcagacttatcacatgcagtcccagagagcagaatagtcccagcatttggaaataacagacgagtaaattctggctcaaaaggacaaaactttctagtaatcagaattttcccataaaggactatgttgcctatcaattagaaaagccctgtcactgtattataaatggtgaacaactgaaagctggatgaccttttgtcaataagtagttggacctgatgacctttaaagtttccttcagattcaaaggctcacaaacacccagatttgaagggcaagaattagggttaaatcctcccacaggcacttgcttccctagactgttttctatcagagtaacattttttatgtcttctctgtcctctataattgaatatttcattaagttaattttcataagtctaggtaagtatccctcacagagctcaaggtcaatatttctatttccattaactaattcatcaggtattttctgagtccctactatataccaggcagaatactaaattctggggatctgacagtgagcaaaaccaacaattcctgccctgtggcatttacagattgtgcttatcaatgtaagctacatttgaagacagccataaagcatttattttaactgcctatagaattaactggataggctgcccagtaaatcagaatatgttcatttagaaaatcagaaacatgagacatgtttttaaactatttctcactgctgattttttcagttaacataaagcaaaacagagagcaaaaataattacctgagaatttgaggcaaagtaagagccaaagcaattatctcatccaaaagtaaaacaaagaaaaacatgtttaccatgattgaccaggaaattgcacctgcattctatttcacctatggataggtcttccaaggaccaaattctaagatagaaatctctgaatattctaaggtcataatgactttcctggccccaaacctaatgtcacatttcttctgacaggctacagaaacaagagaaaacaaaaaaaaaaaaaggtccacaggatggcttgggttgaattatgtgtgtttatgaaggaaagtgtcaactagaccacatgtgtcaaggggaaaaatatcataaagaatttcccaaagaaatccttgagccaaaaccctttcttaagtaaaaatatcatcatttcagggcacattcctctcctgtcatgcatgcatgagcagactgcttcctgctgaaagctcattctgaaaatgaaatgcagtccctatggtaagcctagctttccataaaggcaggacagagtaaacaaaataatcctcactttcagttccatttctttactttaggtaggatctagaatgttcagggaacaggaattcttcgggaaattctagctctttgaaatatagccacacagtcaaacttggcaaaaggttttaaaattgtattcttaaaaaaactatatgaagaagcttttataactcagtatattttttaaaaaccaattgtttctttataagtttcccaacccaacataccatgcaaatcattatttttaccttatgattcaaatgtatccttgaccacatgtaatgggtaaagccacagagacatgatccctctcctacaactcagaagctaactgatttggtgtttaatttttactttacatgatatttcttttgttcttatcattctcaggaagagtcctatagcctgatatgcaatgtacactttggtggtttttggatgcaaccaaaaaaattgtaaattttgtaccatttttgacatatagaaaccacagtttcacatgattcagctcaggaaaggactcatctctctagacctgtttcttcatcttaaacttggggatgttcaataagacgaactcaaaagtcctaggtttgctattctatgattctacaagttacaggatcatgttcatataaggatatactggggaacatatgcataggtgacatttgctattataatttcactaaatagggaaaaaaatcaattcatttcacaagtggttattgagcatctacttaggacaaggccctattaaagaaataattttttgatatgaaaatgatagggctttttatggagaaaaaactctaaaatatttggggggcttgaattccttcagctttaagccaaatttaattttacatttgtcaaatacttggttatgcttaggaattctaagaggattgcttaataagtacagtcatacctttcttctaatgccctggcctgagtccatgaataagaagggaacaagctgccccataagagtttcacaacttctttcaggcactcactccattatatagggaaatttatgaaacatacatgtgccagattctcccagagtaggtgttccctttataagtaagtgataagccactaaaagtgcattaactcttttagtcaataaatcattcattccacaaatattgcctgggtgtgtattatctcaaacactaggctaggattcaagatatgggaataaacagactctgtcttcaaggagctcgcaatctattgaacaaaatagaaaagtaaacaaatacttgtactaccttgtcacaagtatgtaaaaagtattataatggcacgaagtaagcatcagagggcctatttcacaaaaaaagtgacatctgaattggaatgtaaagacatgggaaggaatcaccataggtggcagaggggcaatggggcacaggatgaatactacaggttaattgaacaggttatgcaaaatatgaagacctgaaataatattctatattcagagaaaggtgagaacacctatagagtgtgaggaaaagatattaaagaaaacaaaatggataaagcagattggggctagcttttgaagacccgaaggcctgctgaagaacaccaactctattttgtatgtaagagagaaccactggggtgcctttaaaacggcaggagagcaacatgatccaatttgaaaggtcattgaatgacagtgtggaggatagtttgaaagtgggtaagctctagtcaagatcagctaaatggccattcttttttttttttcttttttgagacagagtctcgctctgtcacccaggctggagtgcagtggcacgatctcggctcactgcaagctccgtctcgtgggttcacaccattctgcctcagcctcccgagtagctgggactacaggtgcccgccaccacacccggctgatttttttgcattttttagtaaagacggggtttcaccatgttagccaggatggtctcgatctcctgacctcgtgatccacctgcctcggcctcccaaagtgctgggattacaggcatgagccaccgcgcccggccggcccattcttaatagtacggaaaagagatgaggaaggacgaaatttaatagagtaaaacactaaattaccactgactaacacccagaaacttaaaagcattcacgtatatcattaaatctcgagttccatctattcacgaattgatcaatctcaaactatgcaatgacaaaacaactagtttaactgattttttttgcaacaaattggccagtttttgtgtcacagcatagagatacttatctgttcatgaactgccataaaataattttcagctggggaaacaaaaagcaactttctagcttatagaaggatttttatgataaaatggatgtccaaatggtatttgttccacacgagaaaagaatctaaaattgaaattaagttctcctatttgagtatcacattaactcaatataataattttctatgtagagagaaaactgtttgcagggataatccaacagtagagaagtgaaatctgtgagtttatttgaaatcttttgggcaactctttgcagcaacagtgccatcttcctacattttgcttagattaattttaagatttatttttcttatttggaacacatctgtaggaagcaaggagcatgcaagctaggatatagcaaatctgagagttagcatttgtgacagataatacacatgtgcattatacacaagacaaaaataaaattttattctcaatttctagatattagataactagatggtggtagttccattctagttattagaaaactatttaggattggaagaactgaggtggtcaaatgaaaaaagtgaattagttgcattcttaccaactgtggagcaaagaaacatgtttctcatggcccaaggcaggcttgaatgagaaggaaatctggggatctacttagatagtgccaagaaagtgccagagatggatgccctggagatgagcaaagagaggtcctgaagtcacaggactaaattccagcacagtggaataaaacagaaaaaagaaaggagtacctacataagagaatcagtaggtttgggagagtgataaaatcttaacttttctattttaacagtgaaatcttttgcagagcaaaaattttgatttttgaagtccaatttatcaagtatttattttctagatcatgctttcagtattatatctaagaattatttgcctaccccaggtcatgaatattccttctcatgttttcttctaaatgctttatggttttccttttttttttttttttttctttttttttgagacggtgtctcgctctgtcgcccaggctggagtgcaatggtgcaatctcggctcactgcaacctccacctcccaggttcaagcgattttcctgcctcagcctcccaagtagctgggactacaggcacatgccaccacgcctggctaatttttttgtattttaaatagagacggggtttcaccgtgttagccaggatggtctcgatttcctgacttcgtgatccacctgcctcagcctcccaaagtgttgggattacaggcgtgagccgtgcccagcctggttttacattttacacttagaactatgatccatttctatttacttttttaaaaaggcatgagtttaggtggaggttaattttttttacatgtctatatccaattgttccaacaccatttgttgaaaagatgatcctttttccattgaattgcctttgcaatttcataaaaaatcaattggccatatttgaatgaagccaatttctggactcaattcagtaccactgatctacatgtctatcccttcaccaatgccacactatattgattactatagctttgtagtaaatcttaacatcagtgtaagtcatccaactttctccttttttcaaaattgttttggctattctggttttttgtttgtttgttttgtcttcccatatacattttagaattattatatatatattgagaatatgtctatttcttctttcagttttgtctatttttgcttcacgtatttttaaagtctgttaggtgcacacacatttagatttgtatgtcttcttggtgaatttacttttatattattacatgatgtctcagtttatccctggtgattttccttgctctgaagtctactttgattattaatatatttataccaactttatttttattcatgtttaaaatgtgtcttttcccattctttttcatttaaccttcctatatctttatacttgaagtatgtttctggtagacagcatatagtcgagtgatacctttttactcattctgattatctctattttaactagtgtgcttacaccatttacatttaatgttaatattgatatgtttgggtttagggctactatttaattatctgtttactcatcactccttatgtttttccttcctctgttaccctttttttcttcttcttttgggttacttgagcatttgttagtattctattttagtttcttattatttcactttgggctgtgtgtgtgtgtgtgtgtgtgtgtgtgtgtatgtgtgtggtgatgactgttacagtaaacaaacttaaactttctcagcatgctttgaatcaatatttgccactttaaatgtgatgtagaaattcttccaagatccctttaccttccatccttcatgttgtatttgccttatatattacttctatatgcattgaaaacccatcagataatgttatagttttggttttcaatgatcaaatatacttcaaacaccttaaaaggagaagaacagtctattatatttgcccaaatatttgctatttatattgctcttccttcattcctcatgctccatatttccttctggtgtcatttcctatctgaaaattttcatttcgtaattcttttagatcaggactgtttgtagtgaactgtattagttttctttcatctgagaatgtctttatttaaccttcattcctaaaggatattttcaccaggtataaaattcaagattaacaattcttttctttcagcacttaaaaatgttgttccactatctttttcatgaacagtttctgataagaaaaccgtagccagttcaataatacatcatttttctcttgctgctttcatagtattttgtctttagctcataatgatttaattgtgataggtctagacatggatttatttggttttgtcacatttaggattcactagacttcttgagtctgtaggtatatgtcttttaccaaatttgagaagtttttagctattatttattgaaatgatgtttcttcccccatgttctttctccattcattccgagtctctaatcacatgaacattagacttttgagtattatcccacacatcttccttcatttttaaaatattttttatgtcttttctgattggataatttctattactatatcttcacattcgctgactcctctgtcaattctattctgctattacacccattctgtaatttttaattttagttattgtatttttcagttctaaattttctctttggttattctttatattatctatttctttgttaggactttttatctcttcattattttcaagagtgtatgcccttacttatttgtacatattttatcagataatttcaacatttgtgatacattagcagtggcatctgttgattcttatgcaggttgagattttactgttgttcagttctgttccatgtgtgtgtcattgaatgaccagtgtgggacctagactgtgacctaccccttagttcagttctcaaagtatttagtatcctgtttaggatccatgcatgcacaaatccagggtgagctcaagagttcacagacaactttatgagttttcttcccaggctccctgctctccatgatctccctagtacttctggtgccctggggctcccttttcaatgttctaatcaggacactgaacttctctcctcccctccacattttctttttctttttcttttttttttttttttttttttttgagacggagtctcactctgtcacccaggctggagtgcagtggctcactgcaacctccacctcctgggttcaagcgattctcctgcctcagcctccctagtagctgggatacatgtgtgtaccatcatgcccagctaatttttttgcatttttagtagagacggggtttcaccatgttggccaggctggtctcaaactcctaacctcaaatgacccgcccacctcagcctcccaaagtgctgggattacaggcataagccaccatacctccctctcctccacattttctagtggcccctctctggagccaacagcaagataacaagtggagggaaagcaagagggtttcactccacatttttgaaaccacagcttctcccatcagagagaaatgttcccatgccccagttttaggaggaacccagtagctgctgttcttgctgtcactgcccctatcacagcacaattgcctaaagactggcagaagagaatggagtagagacttaaaggagaaagagtaggagaaaaagaagaggagggaaaaaaagaagaggaggagctgggggagagaaggaggaagaaaggggatttccaactctttctctaaatattagctaatcttttcctggaagaattagaggtctcctcctggagctctctgtgtctatgttccctttttggtttgggttgccttaagttcaggttaggggttacctagaaacaagaaatggttatcttatcacctatttggtggtactttgaattctgtaccactttctgcttactattacttttcaaataggagttgaaaatacttttcaagaagcacattctaattgaaccagaaccgtatcttatctggaaccataaacataatagacagttgtataaattgtgtttgcattttcaaataattcaaattgcagtatggcttccaataaacaaatatttgttttcttcatttgcctaactataaataacctagttccactacatgtgaagtttattatccattgacccaccagaggtactgctgtgtctttagaaatcagaagcattcttggccgggcgcagtggctcacgcctgtaatcccagcactttgggaggctgaggtgggtggatcacgaggtcaggagatcaagaccatcctagctaacatggtgaaaccccgtctctaccaaaaatacaaaaaattagccgggcgtggtggtgggcacctgtagtcccagctacttggaaggctgaggcaggagaatggtgtgaacccgggaggtggagcttgcagtgaacccagatggcgccactgcactccagcctgggcgacagagcaagacaccgtctcaaaaaaaaaaaaaaaaaagaaatcagaagcattcttattaataatttcaaaaaataattatttggccaatgttatctctacttccttctacttttttctattttactaaaggactatgataaatacaattacatgaagatataatttgtatttaggataaaaaattaatatagtattatgttgtttgatttgacaataattcgaatctctacatggctggaccatttgattatgcatttaaagcaacaatagcataaaaagccccaacatatcaaagactaaccaactaaatagccagtgatataaataaagaaccatttttagaagaagtctatgctgctgtttaatattttgaatcactccacaatgctgaaatcatttaaagaaaaaagatttttatttttatgtgcctgggtttccaatgctacttatacttactaaattataagaccttcatggtctttcataaaattaaaattccatgaaaaaagtataggtaggagttacttctcctaaaaggtatgtcttatctatctaaacagagtgctaaacactcgttgagacaagaatcacatctttgttaatatatgctaataaggctacgaatgcctggaaaatggaactgccaaagtgaaaaagaatctgggtaatattcctgggcactaaaggaaacagaaaaagccagaccaagaagaaagatctgatagattttgtgtatttcaaggcatgatggaactggccagaagtggggaggaggagttgaatgaaatttaactattaagaatatgataggaaaaaaaagagtgggtgcaaatgaatataactggcttttcagataacaaagagaacaaaatgtatcattctgtcttagcacatcaatctgttgataatagtttaataaaacccatttgttcctagacttttagaagttagaaatgcagcacatttttactatgtaagtgttccttatccaataaaactttgattacatagcattgattttattagatttgtacaaatttttcccaaaactccctcttactctacttgtgaaagacaaatatggtttgaaatggagacaccaaatatacactgtttatcccaatggatacttgtggaactataatctttaaaaatgctgaaagggggaggtgaatttccaccgctcactcaaattgaagtgggggaagtgatcacagtgagaatgtgtatggaaagcccacagtaactgttaaggttaagatcacaacttgccaatttagggtttttagaatgacctagctatctgatatataggtaggaaaccaagagttagtaaatggaccatatgtttataagcagagtatgtttcccatggaaaaaaaatacagatttctctgtgaagctgaagtagcctgttctcactctaacctagttattagagtccaaccatattcttcttaggatttcctaagtacctagaatggtgttctacatatagtaaattatcaatataaaagaataaaatttttactttttgtagtcatattatgtgtgtatgtatatatatacatatatttgattcaatttaaagtatcccagtggattttgtctaaaaacacaaagaataggatatgaagtttataatctactgacagtcccaaatatactattttacttgctttaatcaccaacaccaacctttgaacatagtgggcagtcaataaatatctggaggatgagggtatgaatacatgtatttgccagactataacccctgatgaaggaaagggattggccgattctttattgtggctccctacaccaaacattctgagctagcatacccacaatgaaagaacatcatctgaatgaagcttcacaattgctctctcattaccactgggcttctggcatccagcacaccttggagtcctagtgttaaggaatgtattctgagcctctgccggcacaggcatgtcacagtgatgcttctaaaacaaaccagagctcaggtttgtttcaagtcttcacatgcttttgatggaaggtgtgctggcagctgttgtcatcattagccttgtggcaatactttttcctttagtgtcttatgtttcatatgaaagcttaaagctcattaaatagggaggaactttggaatatgtgccaatgccaaacagtaaagtttttattttctcctgttataacagctttaaagttctgaatttccaaatcttagtccccaacaccattccaaattttaaattcgataatggggtaggagcagaaggataccaattccttttcctgactttacaatctttaccagagatctagtaagtgaaagatttagagcctgctagaaaacttgggtgtggaattctcctgtaatcctggcatttatgggatgagtgagctgtccatccatggttctgtaatctagacagttgagatatctgaatctgaatgctcaacctagtacagtcttccatggtattcacatttttctagcagctgacctaagtgatacattttaaaacgcacaataactaatggtcactaagcacctacttactatgtgccaggcaatatcaaaaagcacttcaaatgttaaaatgctcacaaacgctctcagataaatatttatctccattttacagataagaaaacctaggattaaagaggtaagtaacttgcccaagtttttattcactataaggagactttttaaaaaggttaattagtactacttaatattataggtatcttctaaggcaagaactattatctatttcatctttgtatcctccaccatatctagagcaaaaccttacacatacaaacttcttaataaaggtttactgagcaggccagtgtgttggctcatgcctgtaatcccagcgttttgggaggccaaggcaggaggatcacttgaggccaggagattgacaccagattttgaggttacactgagctagcctgggtaacagagcaagaaaacgaaaggccccatagttgtggagtactatatatttattatgtatatttctttctctctctttccctctctctgttttaaattttttcatattagaaaataagtttaagttctagagccttccaagtcattcatacacacacatacacccactcatttgccaaatttacttgggtccctctgaaaccacaagtagcagctgcttaataggtgaacttcaacaccaagcaacaggttggggcaggtaattaagaataccaaatccatttgaaattgcaggggaaatttagggaagtagaacgtatttatcagagttggaatttggccaggattctaaagaaaacaccaattaccctttgataatataaaatagcatataaacactgtttaactgaatttctgactaaggttaagaattccagagactcacagaagggacacatcattcctggacaaattcttccattgagaaagttctttatacttccatagtaacccccttgcctctcacaaagaaaacctcttgttgtcaggttagtaatgaaagtgaattctaataaacagagctggagcaaataagaggtctttctagcactactagctattgtgcaccttagatttagatatctcccttccacaaagtatcacaacctcacatatctcaatgtagaagacacttcaagagagccgatttcatcagaatggcaactttctcagacagctcctctctgcccaagataatttaggtgtgatcatgcttgacatgaagtatgaattcggtaactttctaaggtctctaaccaccttcaagttaggaattctattaagggacctaaccaaaacaagataaaaaagagaggggtctatagatttaagagatatagtgactaagtacaacatgtggactgtgtttgaaacctataattgaagaaattgaacacagatggaatacttgatatatttttaattttctattaattttaagtataattgcaacgattatattttgaagatatacacactgaagtattcgtaaatgaaattctgtaatacctagtattagcttcaatatgaaaaaagataggaagaagttagtgggtagatgtccatgtgttgataattactgaagcccagtgatgggtacttgggagttcactacactattttccataggttgtggcataggtgaaatagatcattgttcaagtgcaatttctgttaacacaattttctctcttttagcaaatgaaagcatctaagaatgcaaataaatgacagtgattttttatagcaataatcttgaatttccactatttcataaaataagtaaactttctaaaacttaatattctaaaacattaaccctcatacaattgtttagtttttgtttaaaattttccattaaaataactttaaaaaagatatcctgtacccattttcaccactcctatttaacatagtactgaaagtcctagccagagcaataatacaagagaaagaaataaaaggcatccacactggaaaagaggaagtcaaattgtccctctttgctaataatatgatcttataccaagaaaaaaactaaagactccaccaaaaaactcttatatttgatcaatgtgttcattcaatttgcaggatacaaaatcaacatacaaaaatgagtagcagtcgggcgcggtggctcatgcctgtaatcccagcactttgggaggccaaggtgggcggatcacctgaggtcaggagttcaagaccagcctggccaacaaggttaaaccctgtctctactaaaaataaaaaattagctaggtgtggtggcgggcgtctgtagttccagctacttgggaggctgaggcaagagaatcacttgaaccccagaggcagaagttgcagtgagccaagatcgcaccactgcactccagcctgggtgacagagtgagactccgtctcaaacacacacacacacacacacacacacacacacacatcagtagcatttctatacaccaataatgatctagccaaaaaagaaatcaagaaggaaatcctatttacaatagctacaaatgaataaaatacctaggaataaatttaaccaagaggtgaaagatatctacaaggaaaactacaaaacataaatgaaggaagtcgaagaagacacaaacaaatgaaaaaacctcccatgctcatagatcgaaagaattaacagtgttaaaaagaccatattgcccaaagcaatctaaagattcaatgcagtccctatcaaaataccaatgtccttcttcatggaattagaaaaaaaaaatcctaaatgtatgtggaactagaaaagaactgattagccaaaagaactgattatccaaatcaatcctgagcaaacagaacaaatctggaggcatcacactacctgacttcaaatataagactagagtaaccaaaacagcatggtctggttataaaagtagatgcataggccaatggaacagaatagagaacccagaagtaaaactacatatttacagccaactgatctttgacaaagccaacaagaatttacactggggaaaggataccctcttcagtaagtgctgccacaaacccacatgcagaagaatgaaactggaccccatctttcaccatacaaaatctattcaaaaatttatacatactatatataaaaatcaactcgaaatggatttaagacttaaacataagacccaaagctataaaaatacaagaagaaaacctacagaaaactctcctggatactgggctaggcaaagaatttatgactaagacttcaaaagcacaggaaacaaaaacaaaaatagataaatgggtcttaattaaactaaaaagtttctgcacagcaaaggaaacaatcgacagagcaaagaggtaacctgttgaatgggagaaaatatttgcaagttattcaacaacattggtctaagctgacacatccagaatatacaaggaactcaaacatctcgagagaaaaaaaatcatcccattaaaaagtggacgaaggacatgatagctatttctcaaaagaagacatacaaatggctaatgggcatctgaaaaaatgctcagcatcactaattatcagagaaatgcaaatcaaattacaaggaggtatcatcttactccagtcagaatggccattattaaaaagaaaaaataacagatgttgatgaggatgcaagggaactcttatatgtggctggtggaaatgtaaactagtatagccattatggaaaacagtgtggagatttctcaaaaacctaaagctagaattgccatatgacctagcaatcccactactggctatccatctaaaggaaaagaaatcaatatatcaaagggatacttgcactctcatgtttactgcagcactattcacagtagcaaagatatggaatcaacctaaatgtccatcaacagatgaatggataaggaaaatatggtatatatacacagtgcaatactatttggccataaaaggtaatgaaatcatgtcatttacagcaacatggatgtaactggaggtcattacgttaaatgaaataagcgaggcacaaaaagacaaatattgcatgttctcacatatgtgggagctaaaattacatggagatagagagcggaaagatagacaacagagactgggaaggatgagatagggggatgagggagatgaagagaagtgggttaaaggacacagccatacagtaagatagaagaaatatattcaatgtttgatagcagggcagggtgactatacttaacaaaaacgtattctattcaagtgatagacaccctaaaaatcctgccttgatcactacacattaaatacatgtaacaaaattcacatgtacccataaacttgcacaaacaaaacataaatgaaacaaaaataactcctaaatcaaacaaatcccattatttttctaaacttcaagttgagttgaacccaattaataacgttttattgaccaatacatgaagccaaagcactttttgggggtttttttagtacttttaattttaaatgtgcaataaattcactcatgctttttgtaaacatttgaatggtatttacaaaatttcgacatgcttccattaacatgctaaaatatattgtgcataccagaaaggtacgatacggtttctgccttcaagaacttacagccaaatttgaaaactagatttaggtaggatatacaacattaggaaagttttaacatctataaattaatatacacagttattcaaaccacagttcgttttaaaaaatcaaaacaaaactaaacccaactaatttatcattcaatccaaattcctacatctatttgcttagtttataattattttgtattactgctttttaatttgttagactttattttttagagcagtttttcttcacaacaaaattgagcagaaggaacacagatttgttatataccacttcttccaccagagtggtacatttgttacaattgatgaacctacaatgacatatccttgtcacccaaagtccgtaatttacgtctgggttcactcttggtgttgtgcattctatgggtttgaaaaatgtacaatgacatgtatccaccattacagtataatatagagtagtttcactgtcctatataagtcttctgtgttctacctattcatccgcctcttcccccaatccctggcaaccattgatctttttactgtctccatagttttagtcttttccagaatgtcttatagtgaaaatcatacagtatgtagccttttcagataggcttctttcacttagttatacacattttaggttcctccatgccattcatggcttgataactcatttctttttagcactgagtaatattccattgtctggatataccatagttaattcatccatttacctattgaaggacatcttagttgcttccaagttttggcaattatgaataaagctgttataataaacatctgcatgccagtttttgtgtggcatgttttcacctcacttgggtaaatacaaaggagcatgactgttggattgtatggtaagactacgtttacttgtgtaagaaactgccaaactgtcttccaaagtggctgtaacccttttgcattcccaggagcaatgaataagaaatcttattccgtcacatccttaccagtatttgatgttgttagtgttctggatctgggctattctaagattcgtgtaatggtattttactgttgttttaatttgcatttccctgaggataaaaggtggatcatattttcatgcttatttacatcatatgcatatttggtgaggtgactgttaaggtctttgggtcattttttaaaatcagtttggtttttcttattgttcagttttaaaagtcctgtgcaagttttggataagagtcctttatcagatatgtcttttgcaaaaatttttccccagtctgtgcctgtcgttttattctgttgaaggtatctctctcctagcagaaatttttcattttaataaagtctagtcaattatttatttcatggaccatcctgttggtgccattaatgtcatatctaaaaagtcatcaccaaacccaggtcatacagattatcttctaggagctttatagtttcccatttcactttgtctatgatccattttgagttaatttttgtgaggggtataggattgtgtctggattctcctttttttttttttttttttttttttgcatgtagatgtccagttgctccaacaccatttgctgaaaagactatcttttcatggtcaaaccacctttactcctttgtcaaagatcagtcaactatatttatgtgggtcaatttctggtttctctattctgttccattgctgtatttgtctattcttttgctaatttgtccattctgtcttgattactgtaacttcatagcaagttttggtcaggtagtgtcagccctccaactttgatcttctccttcaatgttatgttggctattatgagtcttgtctctccaaataaagttagaatcagtttgataacatccacaaaataactttctgggattttgattgggattgaattcaatctgtatatcaaattgagaaaaactgatgtcttcacaacattgaatcttctatacatgagcatggaatatctttccatttatttagttctttgatttttttcagagttttatagttctcctcatatcttatacctattttgttagatttatacctaagtattttttggaggtgctaatataaatggtattatgtttttaatttcaaattccatttgttcattgctggaaagtgattaacttttgtatattagccttgtgtcctgcaacctttctgtaatctcttattagttccaggattttttgtcaattcttttgaattatctacatagaaatttatatcgtatgccaaaaagacagttttatttcttccttttcaatcattacacattttccttctttttcttgtcttattgtactacctatgacttccagaatgacactgaaaagcagtggttaagagggaacatccttatcttgttcatagtcctagtggaaaacctagtttctcactattaagtatgttaactgtaggttttttgcagatattcttgtatcaagttgaagtagttcacctctattcctagttgactgagaatttttatcatgattgattcttgcattttatcatatactttttctgcatctatcaagatgatcatgtgatttttcttctttagctattgatgtgacgaatgacattacagcaatagtccccctgccttattcaaggggcacacattccaagaccctccagtagatgcttgaaattttgaatagtacccaaccttcttgctgtcaattggaacacatttctgtacatgtcttctgctcacacacttaatgtcttttccatcttatctagtgtttatcatacactgtggcaataacttttgctgttgagatatgagagcaaaactagcacgtttatttttccttcttcacaatctcctggttagaagattcattcttaccatagttcttagcaacctcagcatactttttttttctttccttattaagtcaagaacgtttacttcttcacttcaacaaagcactctacagcaactctttggtgtatccaaattaccagcatcactactcttgtactttggggtcattattaagtaaaataaggattaattgaacaaaaacactgtgatatcttatatctgatatcacaatctgataactgagatggctactaagtggataatgggcgggtagcatatacagcatgaatatattgaacaaagggatgattcatgttccaggtgggatacagcagaacagtgtgagatttcttcctgctactcagaatagcactcaatttaagatttatgagttatttctggaattttccacgtaatattttctaaccagggttgagcacaggtaagtgaaactgaagaaagtgaaactgaattgtaggagggtgccgggagagactactgtgattgatttttgaatgttgtacctgccttttacacctgagataaatctcacttggtcatgttgtataattctttttatacattattggatccaattaattttgttttagaatctattgctgcctaaagtcctttaagcatatgttgcagggagattgtgaattgaccccaggttatccctgcctcctactgtttatgcttgtataatcccctctgcttgaatgtggacttctagccaataaaataagacaatgataatgaaatttcctgtcactcctgtgattatgttaatgttacattccacactatcgtgctagcagacttactccacagactcttcttattgactttatgaattaaacagccatgctgggaaagcctgcacagtaagattgatcaatgcgttcattcaagttgcaggatacaaaatcaacatacaaaaatgagtagcggtcgggcgcggtggctcacgcctgtaatcccagcactttgggaggccgaggtgggcggatcacctgaggtcaggagttcgagaccagcctggccaacaaggttaaaccctgtctctactaaaaataaaaaattagccaggtgtggtggcacgcacctgtaggactatggacagcctgaggacctacaggcagctgctaagagctgaggctgacttccaattgacatcacacaagaagccagggccctcagccctacagtcacaaagaaattcatgcagttaacaacttgagtgagcttggaaacagattattccccagtcaaacctacagacaaaactgcaacccagccaacattttgattataaccttgtgaaaccctaagcagaggatccagctaagccattcccagattcctgatacacagaaactgtgagataacaaatgtgtgttattttaagtcaatgcatttttggtaatttgttatagagcaatagaaaagtaataaaaaagaaatgtttaagtcgtaatatgtaagagttctattgaatcctacaatagtactagatctttgtttgtttgtttaaaaagcaaaactttgcctggctaaagtcaacatgtcttttaaaaagacttctatgccaccctgggaagaataatttttcagatttagtcagatttttaagaggacacattaattccagaggaaataatccaggaaaattggcatgtgccatatcagagtagataggaaaatgaacagttatctccattaatcttcaaatttcaaagcaagtttgcatcctgggatacttggtcactagatattatcctttttatgtatcgttggaattgatttgctaaagttttaagaattttttcatctatgtctatgatagatattgctctatggctttcttgtaatgtctttgtgtggttttggtatcaggacaatgttgttctcacagaattaattgaaacatatatcctctgcttcaattttctgaaaaactccatgtacaactagtattatttcttcctcaaatgtttcataaaattcatcaaagcctacaggagtattcaggttatctatttcttcttgagtgagctttggtagtttgtctttcaaagagtttatccatctcatctatgttttcaaatttattaccataaagtttgtcataatattcccttattatatctatctatgtacctattcttaatatctgtggaatctgtacttgtcatctctatcattatgggtattggcaattcgtgttttcttttttcctcatcagtttgactagagatttatcaattttattgattttctctaagaatctggtgtggtttcatttatttttctctttttgtttattttccatttaatagactttgctcttaccattttttcctttttctgattagttttaatttgcttttttttccatttttataaaagagaagctgaggtcactcatttaagatcttctttatagcatttagtgctataatttccctctaagcactgctttgacagcatcccacaaatttcaatatgttgtgcattcatttttattcagttcaagtacgttatttccttttttgtttctctttttttttttttttttttttttggcccataggtcatttagaagtaatttaatttccaaatacttagaattttcctgatagctcttttactgaattctaattccactgttgactgaaaacatacattttatgatttgagtctttttaaatttattgagacttatttaacagcccataatctgatcaatgtaggcaaatgttgtgtatgcttaaagagaatctgtatcctgctgttgttgagtctaatattatataaacattgtcattatttgatagtgttgttcaagtcttctatatccttactgatgtttttctacttgttctatcaatatggagacaggttgaaattgtggatttggctatttttttctttcagttctatcagtttttgttttatgaatttctgaagtctattaggcaaaaaagatttagaaatggtatgtccccttgacaaattgacccatttatagaaatgactctttatccccagtaatattctttgcgatctattttgtttgctataattataaccactacaccttactttagattagtgttagtatggcatcttttttctttcttccttcttttctttcttcctttctttcttttgttcattcttcttttttgagacaggatttcactttatcacccaggctggagtgtagtgatgcaaacgtagctcactgcagcctcaaaatcctgggctcaagcaatcctctcgcctcagcatcctgagttgctaaaactacaggtacaaaccaccacacctggctaatttttgtattaaaaaaaatggtagagacagttttcactatattgtccaggctagtcttgaactcctggcttcaagccatcctcctgccttggagcacattttcatcagtctgtgggtgctcaatgggtccactttagtgatttaggaggaaggaatgatataacactttttttttcctttaaaacactggttgggtggtttgcttagtgagaaaactgatattaagtttgagtgttataaatttcctttagtgaagtccagtcaaacagtataggagaaaagctgtaaatgctaagaaagcactgaaagactttagcatttaattctagatgatgtatccaagcaccaggataaggcctcacaattctacccacacattgcaagcatccaatatatctgtccctgcaagccttgacattcttttagcccacagctgctttgggtagtgagatttcttgacttgccatggcaaggttccttgtattatgatatataatggaatgaattatttcaatggatccaattgtatactaatgccatgtctcacaaggactggtcagagtaaagacagtaagagagcctgccgtgcaaaccataattgaatagagtgtttcttcaccatgttgggaaaaggctgttaattggctcatgtaaccttttctaagatttgttcattggatgccaaaaaggaaaacagtgacattctgagtcacccttatgtcaggtattagatatttattccttgaggaaataaatttttaaccagaaattacttccattttcataaccaagtcccaaccctgtagaaaaaatttattctcaaacccaaagtttttctattttcatcaataattttaggttagggcaaaggacgtgaacagccacttctcaaaagaagacatttatgcggccaaaatatatatgaaaaaaaagctcaatagcaccgagcattagagaaatgcaaatcaaaaccacagtgagataccatctcatgccagtcagaatggtgattatcaaaaagtcaagaaacagatgctggtgaggctgtggagaaataggaatgcttttacagtgttggtgtaaaatagttcaaccattgtggaagacggggtggcgattcctcaaaacctagaaccagaaataccatttgacccagcaaccccattactgagtatatacccaaaggaatagaaatcattctattataaagatacatgcatgcatatgttcactgcagcactattcacaatagcaaagacatggaatcaacctaaatgcccatcaatgatagactgaataaagaaaatgtggtacatgtacaccatggaatactttgcagccataaaaaagaaccagatcatgtcctttgcagggacatggatggtgcttgaagccattatcctcagcaaactaatgcaggaacagaaaacaaacaccacatgttctcacttataagtgagagctgaacaatgagaacacatggacacagggaggataacaacacacattggggcctgtcagaggcggagtgggggagggagagcatcaagataatacctaggtgatgggttggtaggtgcagcaaaccaccaaggcacgtttgcctacgtaacaaacctgcatgtcctgcacatatatcccagaacttaaaagaaaaaaaaataattttaggggccaggtgtggtggctcatgcctgtaatcccagcactttgggaggccaaggtgggcggattatgaggtcaggagttcaagaccagcctggccaacatagtgaaaccctgtctctactaaaaatacaaaaaattagccaggcgtggtggcaggcacctgtaatcccagatactcaggaggctgaggcaggagaatcgcttgatcccaggaagcggaggttgcagtgagcggagatcgtgccactgcactccagcctgggcgacagtgcaagactccatctcaaaaaaaaatttaattaataataattttaggttattcagggaagatagcctctgactaacaaagttattgtttagatgaaacttacctgttgctgagctaccaaggatatctactattccttattttactctcaaaggaaatctatccaaagaaaagcatttttcgtgtgtgtctgtagctttgagtcagaacctttatggcttggttgcctgatgaaatagaatagcagttcctgttagcaccttaacttctcagtattttcaacataatcctgttgattttgtatactggatcttatctgtttccttatctgttatatttaattagaaatagtgatacaggtaaaactatttttcagtttttgagatgaacacatttgtttaatacagtgagagctggagttttagaaactttcatctggagaccaaaatgaataaagtaattattaataggtatgataatacagtcagactttatttttgatagtaatcatacttaactgggtcatcttgaacaaatatgaatatggcagagcaagaaccaaccacataatcctacggggcaatgcaaagtaaaaatgtggggcccactgttcaaaaattgttaaaaattccaaacgaatcattaaatcaaaccatagtccttttgggtgcaggatcctggaagctcgccctggacaaagcagacatactgagatagaagtcactgttaagaccccctcatactctccacttaattttttacctatttgggtgatcacacacataatttcatgatgtcttattactagtgagatgttcacagcagtgccagtaaacttagaatccattgaggagcaacaatagctgttaataaggaactgcaaacctttctacatgttttataaattagataataatcacttaattattgagtttaatggcactttggttctgatgatttaaaactggttttaatgtttaaccaccaaactgttgaactttttcatggttctgattattcctccacctgaaatcagttaatcaatatgaaaatcaactgtaataccggatggccaaggggcagaggtgcaataatggaaagatgctaaagacatttacatattgatatctaatggctgcatacagcaaaaacactgtaacacctctacaaataactactatatattgtctgcctatgaaccagacaccgtgataagcatattaattcatttagtcctcctaacaatcctatgaagtaaataagggaaaaaagagtattcacgaaagtaaagagtcacttaaatagacattacaaaaattgcactgggaactataccaactatactcaaatagggtcatcaagaagaggtcattaaagggactatttacaagtgtgggcagatttgagagaagctattaaggaagaatgtagcacctgtgaggctagccacagcaagagccccaagaggaggagaggttactgtgacctgcaaaagcctcctacagatgtggcctccattagaggaatgtggccaaatgccagtgacctcatagggagagagctgggaaaataaatgcccagaccacattctcctccctccctcagatttcctattgatgctccccactgatcaaaaccaactagaggccacaaaggagcttaattttgtaatctagtgattctcaaaggttagaatgcttcagaatcacttggccagtttgtcgaagcacagattcctgggtcccacccccagagtttatgattcaagaggtctgggatggggcctgaaaatgtgcacttccagcaagtccccaggtgatactgattatccaggggccacatttggaaaaccattgatttaatttaaaacaggtcagcctctctagacagaaagcagggtagataagggaggagtgtgcaattggaagacatccagcacaggaacaacagaagtgacatgaaaacaacagacttgcttatcatccaaaccactgcctctgatgattgcccttttgttcttctttcctccctttgtgaattctaaaaggtttatttctttgccttggtgcaagcaaagagaagcattaagtattttcaagatacctcccaaatagccccttttaacaactccaaacttcagacaatgtctagtctaaactgcctctcaccaaccagaacggatgccagcaaggaaggtttgacacacacagcaggaaagagccgtgacttttccttttactactatgttcaagagcctaggatgcttcggaaaggaaaatctagaaaactgacagttttgatgctaaatctatggcaggtgcttatgagtgtcttgactataaaaattaggttggttggatcatcaatcaggacttgtagtagctgaaatataaggttgaactggatggtctcagttacaatgcagtttgctattactagtctgtattaatccattctcacactgctataaagaactacctgcgactgggtaatttatgaagaaaagaaatttaatcgactcacggttctgcaggcttaacaggaagcatgaatgggaggcctcaggaaacttacaatcatggtggaaggcaaaggggaagcaaatatcttcttcacgtggcagcaggagagagtgatagagcaaagggaagtgctacacacttttaaacaaccagatctcatgataatccactatcacgagaacagcaagtggggaacccccccaccatgatccaaccacctcccaccaggtccctaccccaacaccaaggattacaattcaacatgagatttgggtggagacacagagccaaaccatatcatggtccttgttgcattttcattaaagacaatgagattatactgaaaacaactgaatccttctcttagcaaggcagaaaccgaaagtataactaaaagctaaaatgttaccctgctctgtgtaaacagagtagagcatgtcagattaatgaatgacctacttgcgaaaacgtgtagacaaggattttatctgtgtttgatagtggaaaggttatatccacttcctggcagagatctcagaatatctaatttatgtgacaaaaatgaaaagttctcaagaaatataccaaggcatgattagcctatttattcccccaggggtttaacactagcttttagttgtctgctcaatatacatagtatttttgtttatttattttgtaggattgtgttaacttaagctttgaaaggtgtgcacattttttatttcctgccttatctgggaaaaaacctgacgagatgtcagaaatagatcaggtttaaattagttttatttatttttatttttatttttatttttgagatgaagtctccctctgtaccccaggctggagtgcagtagcgcaatctcagcttactgcagcctctgcctccccggttcaagcaagtctcctgcctcagcctaccaagtagctgggattacaggtgcccaccaccatgcctggctaatttttgtatttttagtagagatggggtttcactgtgttggccaggctggtcttgaactcctgacctcaagtgagcctcccaccttggcctcccaaaatgctgggattataggtgggagctaaattagtattttaaattagaatcctacttgctacattactagggagaaggaaggtgatagatgttaacttgtatattctccatttacttactgtttactatttataagcaaatttctaaagcaataatcaccttagcattttaattccaaataccaatctaagaattaaaccaaataattattccacccagaatgtcattaagttctattagtctttttagtgttcatagtttcatctatgaaattggatttaacactgtgttctttaaaagttgaattatgatctggcccagtgtggtggctcatgcctgtaatcccagcactttaggaggccaaggtgggtggatcacttgaggtcaggagtacaaaaacagcttggccaacatgctgaaaacttgtctctaccaaaagatataaaaattagccagatgtggtagcatgcacctgtagtcccagctactctggaggctgaggtgggagaatcgcttgaatccaggaggcggaggttgcagtgagctgagattatgccactgcactccagcctggggaaaagggcaagattctgtctcaaaaaaaaaagttgaattatgatcaaaataatgctgtataaaatggaaaaagaatgaatgtactaatatccacttaaaaacacactaaattggattatttggccaaataacggaaattaagtcagtccaaagatgcacaattacaagctgttctccccacattttcatttgtgtattcctccaaaaactttggtctaattgcacagaaacattaagaccctagtcattgtttcatgactcctagggatattggggtctccacaatgtgacagaagcccagagagaactgaagctaaatggatattgtgagactggtaatcaacaaaaatcacagtgtctgggtttcagggcctaactctgggctgttatctttttcccagacggctgatcaagtggatgaggtatgaaatgaaagcaaaactccaagcaacaatactcaccagttggttcaatagcagtatcatttttaaaataatataaaatcaacagtacttgccataaaaatttcaaacagtagagagggcataaaattaaaagtaaaaaaatacctttatccctcttcagcttctaattgtattgcccagaaggtttttttttttttttgtagtcttccaggcattttctatgcaaattcaaataagtaaacataaaatatcctttgtttatatacaactgagatcatactctatatattaaatctgtaatgtttgtttctgtttttgttttttttgagacagaatctcactctggttgcccgggctggaatgcagtggcatgatctcagttcactgcagcctcgacctcccaggctcagcctcccgagtagctgggactacagacatgctgaccaccatacctggctaattttttgtatttttagtagagatgggatttcgccatgttgcccaggctggtcttgaattcctagactcaagcaatccgcctgccttggcctcccaaagtgctgggattacaggcaatgaaccaccgtgcccaacctaatctgcaattttttttttcatatactgtatcttgaagatttttctatagtggcacagcaggtcctcaaataacgtcatttcattcaacatcatttcattttaacattgatgagaaaaaaaattgattcccagccagggccatgtgaagtttgcatgttctcccatctttggtgagttttctcccaatcccaaaaatgtgcacattaggtgaactggtgtgtctaaatggttccaggatgagtttagggacatgtgtgagtatgccccgcaatgggatggaactctctgtccagggttggttcccaccttataccctcggctgcagagattagttctggcctcctgtgaccctgaactgaaataactgggtaaataattatcttacttatttttattaatctttcttaagcatacgtataattcacatttatttcaatgtttaatattagaagtgttttggtctttattgagaaatttggtgatgttctcatgaccagaactatgttatagaaacttaattcttggccaggcgcggtggctcatgcctgtaatcccagcactttgggagactgaggcgggcggatcacgaggtcaggagatcgagaccatcctggctaacacagtgaaaccccgtctctactaaaaatacaaaaaattagccgggcatggtggcaggtgcctgtagtcccagctacttgggaggctgagacaggagaatggcatgaaccctggaggcggagcttgcagtgagccgagactgcaccactgcactccagcctgggcgacagagcgagactccgtctcaaaaaaaaaaaaaaaaaaagaaacttaattcttgtttatatcaattagcctgtggtaaaatttatgttgttatacatcatttcccttaaagtcagtttccaagaacctagtgacaatgttaagtgaggacttaatgtacatatagatgtacctcacagaatgtattaccacataaattatggttactataatttaattaaccagtcccatattgatgaacattcagtttgtttctagatttttcctgttaaaacagttgagctttgtcacctggcttctataattttggaagcctgttatccccattgctatcagtaagactagttctgtgagagtctctctcttactgtcagctgtggcctatagaggatagccaacactgagtttctcaatgattatggtactcctttcaccatctcattccttatcactttagaaagcaggttctcctccaggctctgagtttatggcactctcctagaatataggatttagtcacctggcaagaactccaagagacactgctaccatgctgacagggtaactcttagaaccaaaaaaacaaaacaaaaacaaaatggcctacactaagtgaagtgaaaataccatccgcttgccaaactcataagccattagaagcaaggtaggcacaattatcacaagcaacagcagatcactgtgaaagttccctgaaccacagaaagatacagattttttaatagagcatggtacccatggtgccagacagatgggaagccaataagggtattgctcaatctaactgatcaaaagaaatcaaagatggatgaaacaagaggttgatggtaactactgccaacaaaaaaaatgaaatcccttgtttggtttcaagacctgagccaattctcagtcccagaactcaccgactaaatcaaaagccagggtcccaaggaggaagtaccttacaacatcatagcaagtatatacaggaatatagctattatttcccaaagactagaaaaaaagatattcgtcaatatggaactgactgactaaaccacggtacatcccaacacagaatactgtatagctgtaaaaagaaatgaggcatctctctttatacttatatgaagggatctccagaatgtatcattaaatgaagaaaacaaggtgcaaatcagagtatatgttaacttttgtcaaaaaaaagaaagaaaaaagaaaagaaactaaaatatacacattttctttttattttcaaagtgaattaatgagaagctaaactaaaaccatgcaaatgatactgtagagtgggaaagaaaatagtgaaagcacaggcacgcaaacaaaatttcgcatcagaaaactagatagtcacctcgaagggttgtcacttggcaaaggacaatttgagcatgaaaaataatactgattccaactgattaaaacacaacaaatatgtaaatccatgaattcataattaaactaataaaaaaaaaacttcatttgttaccattagaggttcttaggacacacaaacttactattccaaaaaattccatgaatgaagggaatcaaggatatattctgttttcatatgcaaactatatttcagagtaaacagtcactcttatcagagaaagttcttccttacagaagaactaattcatcaccattttggaacaattagtgaaataatggatataagtattaatcatcaatagctgctaaaaccctaagtaaaagattgatggaagtttttgggtggccagattaggttagcagcacaaacaataggacaactgttcattgtctcctggtgtgatgtaataggaagcacaaggcaccatgtatgaagtatactgcctccccccaaaattgaacctgagtataaataagcctttataatttagtattaatttttaggaaatacaggatatagaacaacaagttaaatgacaccaggaggtaaaatgagccaatccagaatgcagaacatcatatggatgaatgatccagtttcttccaatacatcagaaaataaaaagagataaaactataatcagttaaaagaaatttaagatatatgacaaccctatgagatatgtagattttggatcctttatttttctagtgctgctgtaacaaattatcgcaaatttagtggcttaaaacgacactttattctcttctaggggtcagaaatccaaaaaggggcctcacaggctaaaatgcagtcagaccaccttccttctggaggctctaggagttaatccatttttttgccttttccagcttgtggaggctgtccacattccttgccttgtgccccccttgcagcaagggcatctctctgccatctgtttctgctctcatctccttctgtgattctgaccctcctacttctctcacatggaaacactgtaaatacactgagcacatccagataatccaggataaccttcccatctcaagatccttaacataatcacatctgcaaagtccccgttgccacataaagtaacatggtaacatagattccagggcataaaatgtggacatcttcgtagggatggggttatggggcaatattctgtctaccatggattctgattcaaacaaactaactgtgaaaagatttttttcacattgttggggaaattttaccatagattgggtatcgtattatataaaggaattactattaatttttaggtatgagaatgacattgtggttatgcttttttaaaaaaaaccttatctgatgaaatgcttactgaagtatttagaggtgaaatgatatgatctctgggatttgctttaaaatactaaaaaaaaaaaagaatatggggaacagattaaacaagatatgcaaaataaaaaattgttaaagctgaactatggtttcatagggttcagaatacttttctctctactgctgcgtgtacttgaaaacgtccacaacaaaaggttttttaaaaatcaaagataatctaataaggtttaaaagggaaggaaaggagagagtccaatgcttcaatgaacagttcttatgcaaatattgttacataccagtgtggatgtatggtaggataaattgtcagatacagaattgcatttaaaatgtttgtagtaattgctttgcatgaataataaggttgaacaactaagtaaacaaacggaaggttgtgggagccagatttctccctgtgagagactaaagttgcaaataaactagaaggggaggataaaataaaccctgtggtgctggattagaattgaagacatcagtatgaactcacggttagtttaatagataaatagacaggtagacactacttatagatatgtgtgtatacaccagttaatatacatacatacatacattacctagccctgttgactcagacatcctggaagcaatcacaccccagcagcaaagcacaaacccagtactcatatcttggcttctaaataccattttccaataaaaggaaccagagattcttgggaaactggctgattctaggactggggccgggaaaataaaaataagcctgaaacatcttacaataccagaaagtaaggaactgctcaaaaaataaaatgatagaagcatgccaaagagtcacaacagccaacctgaaagaactaatggccaaaactggaaaaatctgagcaacaaaataaataacatagcattggattataatcccaaattataaaataaatatacatgaatccataatgatatatatagaagatcaaataataagtaagaagaagtactagcattgggttaatgctgggatctactcttggtgaggctgataacattcaggaagtcaaggtaaaagatggttaagtgtaatgggacaggttacagcccaaagaaactcatagatacactgggtctattctaggtttaggttatatggtgttacattttgctttcaaagatgaagagattggacatcctgaaagtctttcaatacctgcaatattgggcagagctaagatagataatgctttaaaaaaattatttactaaacgtagctcttaagaatctctctataatctggtatttccattatccacatactggctcagccaccagtttagaaaaaggaaggtaacttagatagttttccaagggcatttcatacacttctgtccccacggaaccctctaacacccctggggatagttatccttaccttttcagtatgagtccagcaatagacactatcctataacaaatgaggttattaaggcaaagtgtcagctgccccacatgacaaagtcagagtctcatagtctcctctgaggagctgaaagattcctaaaatctttaagataaactctatacaagcatttgaatgattcattctcctcaaaggaactttacaaggttcaaggctcttcctggagaccccaggtgtggcggcggcagcagcagcaggcagcaggccactgtctttcccaacaggctaaaactgatgtcaaaagcagttgtaaaaatacctaccattgaaccaaaaataactattagaaccatgaatgataaagtgaggcaaaaagacttttctttaagcttaacttttaggcacttaagtctcagtactcttcacccagatgtctacatggatcactcattttcttcttttaggtctttgtacaaaggttatctcatcagcgaggcctttcttgatcatcctatagaaaacagaatctgcctcaattctggatttcctttctctcttatcctgctttattctcctcatcaggcatgctttatatttgtttacataatatccatcccctccagtaatctccattttggccatgattttgactattttgcttcccatggtctcccatttttctttagaacatttgcctggacagttaatagtggtcagtaagtatgtgttgattgaacctcaaactggaaatgacccaaatgtccattaacatgtgaatggataagcaaaatgtgggtacttctatacaatgggatactactcagcaatataaaggaaagaactattgatatgtgcaacaatatatggatgagtcttaaaatcattatgtggaattaaggaaccaggcacaaaatagtaaatattatataattccatttgtataaagcacaaataaaatagagatgaggctgagatgggaggatcccttcaagccagaagtttgagactagcctggacaacatagcaagaccctgtctcttcaaaaaaaaatttttaattagccaggcatggtggcatgtacctgtggtcctagctactccagaggctgaggcaggaggatcatgtaagcccaggagtttgagattacagtgagctatgatcatgccactgcactccagcctggatgacagagcaagactctgtctctaaaattaaaacaaaataaaaatttaaaaagcagatcagtggaagtgaggatagagtatagaaaaagggaggaactgcaaaggagcacaaggaatctttgtggggtgatggacatgttctgtattctgattgtggacaggtgcatacaatttgtcagaactcatcaaattgtacactttaaatacatgcagtttattatgcataaattattcctcaacaaagttgaaaaagaaaaaatatttgttaaatcaatttacctagtgtatttgcagcttaactaaaactttagaaattttggatacattgtgtttgcaaatttgaacttcaaaatgctggaaatatagaggggttttttttccctttctccatttcaagcaaggggtttcagagtgctatttcccatatatgcagtgaagaaagctttctttagctggcccaaggggctatgaagtaggagttttgaaatcagctgactcaagcataaataagtgacctatgcttaagaataactgaagaaaggtgagattatgcttgagtggaggttccatattataattatgctttacaaattcatttcagccattgatatcaaaatctctaaacactcaaatgtcttgattaacactttccttgaggccagggtcatgtacctccttgtaattaaatctccttaatatattcacataatgctgagctccatcttattgtccatatgaactatagcacccagtgttacagagtattgccagtgtaaaatatgaataccaaactctggtttaagtttttctgtagaattatcaatcttaacatataaagtaaaatccattttgaaatggatttctaattcctacagaatgttttttggacaactgaagaaatgtgtacttgtttttaaaatgaagctgcaatattgtaaaggaactctgcagccactcataacagcatagtgtgttttatgaataagttcacattagttacatttggcaaactggacaaagaagcaataatatacactatgaacgtgttacattccacttttaatcaacaaagctttcagtacattgtcatattaagaaaaacattgcaattagaaaaagaagctagattatttactgattattcactattttcacataaaccttctaacatttataataaaagatgaaattgttaaatctcttagccatgaaaacaatacgataaaaacctaaaatatgtactatattttactaaagtatattttagtatcgtaaatgacaggaaaaggggattatgtacacaattgagacatcaatgacaataataaattgcttgaaacttcatgttgcatagctagaaaagagatactttgataagtaatatcaattactatcctctgcattgaagagatgaagtctttaagtaattctgctcccctttttccgttctcagctatagcatgccccatgatctaagatccgaccctcctcattctctagagagtaacataaaagtgattgtttggaaataaaatgaggggttgaaactctgtatttcagaagacacaatcagttacctgacacccaacaccaatccttgctgtgttaagaatgtcagtgtttctcatgcctcactcaggaagagttgcttcaatacatccctccacagctttattcagtttggtcacacctcagggagtttaatttcatgcaaagcttttagacagtgctttccagtgacaggagcaaatctgggtaccttaaggagtttaggaaaaatgaaaacaacttgaactattaatgcttgatctgaactttggccttgccccagagttagtcttcaagaagtgagaagaaagcagaatgttggcaagacttgagatattaactaaaaatgtaaacatcttctaagataactgttgtagaagaaagaggtaaacataatggaataaaagatgatcttgttgtatttagggctgatattatagccataaagggaaatggcaataaaaagtggatgtcagagatttgactaaactgaactgatttcataaaaggcttaagaatcagcctgactgggaaaagagaggtaaaacacctgcgttactagtccccacatgaacaatgcatttattttcaaacaaagagtagataatgctcaagctttggaaggggagatctatttttcagagaaagtatggacacctgaaagaaacacaaggggcattgtgtttaggaatgaaacatgtgatctaaggaaatgccagtttatccaagttttggctgagttactgctttgtcaagagaagggacatatttttgaaacaactgtgattaactgaagtttaatgtgcctttttgtaattacctataattttaaaagattatattgtagcttgtaagcctggtttaagaataaataaggtgatctttttaaaaaacaaaacatcacatgtgttttattgtttagaatttacctccaaatacagaggaactctacattttgctatttactaagacaattttgtttattcaatttggcttctcttttggcctttggtttctgaacatggtcatatcaccaccgattacttaatatttctcaaagtttctgtaattatgcaagtgactgaaaaatcactctgcataactgggatttcaaataagataaattatcacaatttataggaccttgttgttccatgttctaattcaaaggatagtgcctgagtaaatttttcttatacattctagaactcacagacattaaaactctctgggtcacaaatgagctaaaagaataaatgcagactgttagaattgctttttgagtttcacgtcatttctgagctagaggacattctcctagctgtagtctttagctgtgtgacctcatacaagtttgatacttcacttctccactcttcttttctccatctgtaaaaaaaaatgcaaagctatcccacagaattattcttagtattactttttgtagttcgtgtttataaaaatgtatcagtatatttaccagtctctttgataaacattgttacttacatcccactcttctccattgttttcttgtgactgaggtatatcatttagtgttctcttgggaagaatctgtgagttttgcctttgaatgatattttcattggttattaactcttaagcagacagttcatttacctcaactgttagaagatgtttatttgctgtattctgctgatgccgatgagaaatctgtcagcagactatcattcatgtataagcaatccattttttctctaagattaaagtgagacaattggaattaacataattttaaggttcctgtcttatttgtctggaggacagatatattaactttagacttgttaataaaataattttaagaaagccactgaaattacagaatatataactatcaaaccagtagagggggagagaagtggtagatacagagaaaaaaaaaaacagagtaaatggaagcacaaaagatgataaaaataattctaaatatgtcagtaatcactaagtggcgtaaactcaccagatacacactggagactacaaaattgttactttcttaaatccatctgttgggttccaagatagccaaataggaacagctccagtctacagctcccagcatgagcgacgcagaagacgcgtgatttctgcatttccaactgaggtaccgggttcatctcactggggagtgtcggacagtgggggcaggacagcaggtgcagcccacggagtgtgagtcaaagcagggtgaggcatcacctcactcgggaagtgcaaggggtcagggaattccctttcctagccaagggaagtggtgacggacggcacctggaaaatcgggtcactcccaccctaatactgtgcttttccattggtcttagcaaacggcacaccaggagattatatcctgcgcctggctcagagggtcccacacccacggagcctcactcattgctagcacagcagtctgagatcgatctgcaaggcagcagcgaggctgggggaggggtgccggccattgctgaggcttgagtaggtaaggaagccgccaggaagctcgaactgggtggagcccaccgcagctcaaggagtcctgcctatctctgtagactccacctctgggggcagggcacagccaaacaaaaggcagcagaaccctctgcagacttaaatgtccctgtctgacagctttgaagtgagtagtggttctcccagcacggagtttgagatctgagaacggacagactgccccctcaagtgggtccctaacccctgagtagcctaactgggaggcaccctccagtaggggcagactgacacctcacatggccgggtacctctctgagatgaagcttccagaggaatgatcaggcagcaacatttgctgttcagcaatattcactgttctgcagcctccactgctaatacccaggcaaacggtctggagtggacctccagcaaactccaacagacgtgcagctgagggtcctgactgttagaaggaaaactaacaaacagaaaggacatccacaccaaaaccccatctgtacatccccatcatcaaagaccaaaggtagataaaaccacaaagatggggaaaaaacagagcagaaaagctgaaaattctaaaaatcagagcgcctctcctcctccaaaggaacgcagctcctcaccagcaacggaacaaagcaggatggagaatgattttgatgggttgagagaagaaggcttcagaagatcaaacttctccaagctaaaggaggaagtccaaacccatctcaaagaagctaaaaaccttgaaaaaagattagacgaatggctaactagaataaccaatgtacagaagtccttaaatgacctgatggagctgaaaaacacggcatgagaactacgtgatgaatgcacaagcttcagtagccgatttgatcaactggaagaaagggtatcagtgattgaagatccaatgactgaaatgaagtaagaagtttagagaaaaaagagtaaaaagaaaggaacaaagcctccaagaaacatgggactatgtgaaaagaccaaatctacgtctgattggtgtacctgaaagtgacagggagaatggaaccaagttggaaaacactttgcaggatactatccaggagaacttccccaatctagcaaggcatgccaacattcaaattcaggaaatacagagaacgccacagagatactccttgagaagagcaactccaagacacataattctcagattcaccaaagttgaaatgaaggaaaaaatgttaagggcagccagaggcaaaggtcgggttacccacaaagggaagcccatcagactaacagcggatctcttgggagaaactctacaagccagaagagagtggaggccaatattcaacattcctaaagaaaagaattttgaacccagaatttcatatccagccaaactaagcttcataagcgaaggagaaataaaatcttttacagacaagcaaatgctgagagattttgtcaccaccaggcctgccctaaaagagctcctgaaggaagcgctaaacatggaaaggaacaaccagtaccagccattgcaaaaacatgccaaattgtaaagaccatcgaggctaggaagaaactgcatcaactaacgagcaaaataaccagctaacatcataatgacaggatcaaattcacacataacaatattaaccgtaaatgtaaatgggctaaatgctccaattaaaagacacagactggcaaattggataaagagtcaagacccatcagtgtgctgtattcaggagacccatctcacatgcagagacacacataggctcaaaataaagggaaggaggaagatctaccaagcaaatggaagactcaaaatggcaggggttgcaatcctagtctctgataaaacagactttaaaccaacaaagatcaaaagagacaaagaaggccattacataacggtaaagggatcaattcaacaagaagagctaactatcctaaatgtatatgcacccaatacaggagcacccagattcataacgcaagtccttagagaactacacttagactcccacacaataataatgggagactttaacaccccactgtcaacattagacagatcaatgagacagaaagttaacaaggatatcaaggaattgaactcagctctgtaccaagcggacctaatagacatctacagaactctccaccccaagtcaacagaatatacattcttctcagcaccacaccgcacttattccaaaattgaccacatagttggaagtaaagcactcctcagcaaatgtaaaagaacagaaattataacaaactgcctctcagaccacagtgcaatcaaattagaactcaggattaagaaacccactcaaaactgatcaactacctggaaactgaacaacctgctcctgaatgactactgggtacataacgaaatggaggcagaaataaagatgttctttgaaaccaatgagaacaaagacacaacataccagaatctctgggacacatttaaagcagtgtgtagagggaaatttacagcactaaatgcccacaagagaaagcagaaaagatctaaaattgacaccctaacatcacaattaaaagaactagagaagcaagagcaaacacattcaaaagctagcagaaggcaagaaataactaagatcagagcagaactgaaggagatagagacacaaaaagcccttcaaaaactcaatgaatccaggagctggttttttgaaaagatcaacaaaattgatagaccactagcaagactaataaagaagaaaagagagaagaatcaaatagacacaataaaaaatgataaaggggatatcaccacccatcccacagaaatacaaactaccatcagagaatactataaacacctctgcacaaataaactagaaaatctagaagaaatcgataaattcctgaacacatacaacctcctaagactaaaccaggaagaagttgaatctctgaatagaccaataacaggctctgaaattgaggcaacaattaataccctaccaaccaaaaaaaggccaggaccagacagattcacagccgaattctaccagaggtacaaggaggagctggtaccattccttctgaaactattccaatcaatagaaaaagagggaatcctccctaactcattttatgaggccagcattatcctgataccaaagcctgacagagacataacaaaaaatgagaattttagaccaatatccctgatgaacatcgatgcaaaaatcctcaataaaatactggcaaaccgaatccagcagcacatcaaaaagcttatccaccatgatcaagtgggcttcatccctgggatgcaaggctggttcaacatacgcaaatcaataaacgtaatccagcatataaacagaaccaacaacaaaaaccacgtgattatctcgatagatgcagaaaaggcctttgacaaaattcaacagcctttcaggctaaaaactttcaaaaaattaggtattgatgggacgtatctcaaaataataagggctatttatgacaaacccacagccaatatcatactgaatgggcaaaaactggaagcattccctttgaaaactggcacaagaaagggatgccctctctcaccactcctattcaacatagtgttggaagttctggccagggcaatcaggcgcaggagaaagaaataaagggtattcaattaggaaaagaggaagtcaaattgtcccagtttacagatgacatgattgtatatttacaaaaccccattgtctcagcccaaaatttccttaagctgataagcaacttcagcaaagtctcaggatacaaaatcaatgtgcaaaaatcacaagcattcttatacaccaataacagacaaacagagagccaaatcatgagtgaactcccattcacaattgcttcaaagagaataaaatacctaggaatccaacttacaagagatgtgaacgacctcttcaaggagaactacaaaacactgctcaacgaaataaaagaggacacaaacaaatggaagaacattccatgctcatggataggaagaatcaatatcgtgaaaatggccatactgcccaaggtaatttatagattcaatgccatccccatcaagctaccaatgactttcttcacagaattggaaaaaactactttaaagttcatatggaaccaaaaaacggcccacattgccaagacaatcctaagccaaaagaacaaagctggaggcatcatgctacctgacttcaaactatactacaaggctacagtaaccaaaacagcatggtactggtaccaaaacagagatatagaccaatggaacagaacagagccctcagaaataataccacacatctacaaccatctgatctttgacaaacctgacaaaaacaagaaatggggaaaggattccctatttaataaatggtgctgggaaaactggccagccatatgtagaaagctaaaactggatcccttccttacaccttatacaaaaattaattcaagattgattaaagacttaaatgttagacctaaaaccataaaaaccctagaagaaaacctaggcaataccattcaggacataggcatgggcaaggacttcatgtctaaaacaccaaaagcaatggaaacaaaagccaaaattgacaaatgggatctaattaaactaaagagcctctgcacagcaaaagaaactaccatcagagtgaacaggcaacctacagaatgggaggaaatttttgcaatctactcatctgacaaagggctaatatccagaatctacaaagaactccaacaaatttacaagaaaaaaacaaacaaccccatcaaaaagtgggcgaaggatatgaacagacgcttctcaaaagaagacatttatgcagccaacagacacatgaaaaaatgctcaccatcactggccatcagagaaatgcaaatcaaaaccacaatgagataccatctcacaccagttagaatggcgatcattaaaaagtcaggaaacaacaggtgctggagaggatgtggagaaataggaacactttgacactgttggtgggactgtaaactagttcaaccattgtggaagacagtgtggcatttcctcaaggatctagaattagaaataccatttgacccagcaatcccattactgggtatatacccaaaggattataaatcatgctgctataaagacacgtgcacacgtacgtttattgcagcactattcacaatagcaaagacttggaaccaacccaaatgtccatcaatgatagactggattaagaacatgtggcacatacacaccatggaatactatgcagccataaaaaaggatgagttcatgtcctttgtagggacatggatgaagctggaaaccatcattctcagcaaactatcgcaaggacaaaaaaccaaacaccgcatgttctcactcataggtggaattgaacaatgagaacacttggacacaggaaggggaacatcacacaccggggcctgtcgtggggtcgggggagcagagagggatagcattgggagatatacctaatgtaaatgacgagttaatgggtgcagcacaccaacatggcgcatgtatacatatgtaacaaacctgcacattgtgcacatgtaccctagaacttaaagtataattttaaaaatccagctgttaatctgctgttaagaagacatttaaacctgagagcacagaaaagttactattatagaaaaaaatacactaggctgtcactaccaaaattaaacgctggtggagctacactaattgtcataagcagaatttgaagatggccctaacatttccagtccctagtgtacacacacctttgtccagttatgcagtcaaacacaaatttaggtactcctgaaaaggaattttgtagatatcctaaatcagttgactgtagataaggaagttatccatgtgggccagaagaagccagagagtcaaagcatgagggagatttaatgcataaaatgttccccattactagctttaaaatggagagggctatgtggcaagaaactctaggagctgagagtggtccctaattacaggcagcaaggaaatggggatttcagtcatacaaccacagggaactgaattctgccacaaccacatgaacttggaagaggacccagagctctagctgacaacacagaccagccaataactgaatttttatctttataagaccctgagtcaaggaacaaataagaaaatgtggcctatagtcaagaaaagcaaaatattcaaaatagtacatctaaaccaaatggtcaatatatacatgaagatactccacatcattagccatcagggaaatgcaaatcaaaaccacgatgagatacttcttcacactcagtaggatggctaaagtaaaaatgtcagataacaactggagaaatcggaatccatatacactgctggtggaaatgtaaaatggtatagccactttggaaaacagtccagcagttactcagttaaacatagagttatcatataatttagtaatttcactcctaggtatctatcttggagaaataaaaatatatgtccacacaaaaacttgaatgcaaatgtttatagcagtattatttattatagttaaggatggaaacaacccaatgtccatcaacagacaaatggataaacaaaatgtggcatatctaattaaatattatttggcaatataaaagaatgaagttcagatgcatactatatcaatgaaccttgaaaacattttgctaagtgaaaaaaagccagacacaaaagatcacatattatatgatttaatttgtattaaatgtccagaataggtaaatctatggagatggaaagtagattagtgttgcctagggattggggaaaaaattaggagtgataactatagggtttctttctgatgtgatgaaaatgttctaaaaatgaacgtggttgtgcttgtatatatctgtaaatatactaaaagtcgttgaattgtacatgttaaacgagtgaattacattatattaaatatttcctgtaaggctattattttttttaaatgaattaaatggaggtcctaaaccgaaaactatataataactgaaatgaaaaattcagtaaatgagcataatagcattttggatatggcaactgaaagagtcagtgaatgtgaacgtaggtcaatagaaattatacactgtgaagagcagagataaaaagtatatgacacaaagtcactgaaagtaaaagaatggaaaaataaacatgatgaaaatgggaactgatatgacaatattaatattagacaaagtaggattcaagataaagaatattacaaaggatacagcaggaaatttcacaatgataaaaagaacaattcatcaggaagacctaacaatctaaatatctatgtagactggacatggtagctcatgcctgtaataccagcactttgggaagctaagacaagaggattatttgattcaaggagttcaagagcagcctgggcaacacagtgagaccatatctctacaaaaatttaaaaattagacaggcatggtggcacatacctgtagtcatagctactcaggaggatcacttaatgcacaggaatttgaggttacagcgagctatgatcatgccactgcactccagcttgggcaacagagtgatgccttgtctcaaaaaataaaataaatacgtatgtacttaagaagaacatcaaaattcattgggcaaatattaatagaaatacaggaaggaatattaataggcaaatctacaaataatattagagattataatagctctatctcattaactgataacaattaggcaaaaaagtcggcaaggaaataaatgatcaataatatttacctaattaatatttataaaacactcagccaacaactgcagaatgtgcattctactcaaacgtacatagtaaattcactaaggtaaaatactcatatatactaagctatacattctcaataaaaagtttctactttaaacttcatatggaaccgaaaaagagcctgcatagccaagacaatcctaagccaaaagaacaaagctggaggcatcatgctacctgacttcaaactatactacgaggctacagtaaccaaaacagcatggtactagtgtcaaaacagcatggtactactatcaaaacagatatatagaccaatggaacagaacagaaacctcagaaattaacaccacacatctacaaccatcagatctttgacaaacctgacacaaacaagcaatgggggaaagatcccctatttaataaatggtgttgggaaaactggctagccatatgcagaaaactgaaactggaccccttccttaaatcttatagaaaaattaactcaagatggattaaagacttaaacataagacctaaaaccataaaaatcctagaagaaaacctgggcaataccattcaggacataggcatgggcaaggacttcatgtctaaaacaccaaaagcactggaaacaaaagccaaaactgacaaatgggatctaattaaactaaagagcttctgcacagcaaaagaaactatcatcagagggaacacgtaacctacagaatgggagaaaatttttgcaatctatccatctgacaaaaggctaattttaatccagaatctacaaagaacttaaacacatttacaagaaaaaaataaccccatcaaaaagtgggcaaaggatatgaacagacacttctcaaaagaagacatttatgcagccaacaaagatatgaaaaaatgcccatcatcacttgtcattacagaaatgcaaatcaaaaccacaatgagataccatctcacaccagttagaatagcaatcattaaaaagtcaggaaacaacagatgctggagaggatgtgaagaaacaggatcgcttttacaccattggtgggagtgtaaattagttcaaccattatggaagacagtgtggcaattcctcaaggatctagaactagaaacaccatttgactcagcaatcccattactgggtatatacccaaaggattataaatcattctactataaagacacatgcacacatatgtttactgtggcactattcacaatagcaaagacttggaaccaacccaaatgtccatcaatgatagactggataaagaaaatgtggcacatacacaccatggaatactatgcagccataaaaaggatgagttcgtgtcctttgcagggacatggatgaagctggaaaccaccattctcagcaaactatcacaagaacagaaaaccaaacacctcatgttctcactcataagtgggagttgaacaatgagaacacatggacacaaagaggggaacatcatacaccggggcctgtcggggggtggggggctaggggaggaatagcattaggagaattacctaatgtaggtgacgggttgatgcagcaaatcaccatggcatgtgtatacctatgtttcaaaactgcatgttctacacatgtaccccagaacttaaagtattattaaaaaaaaaaaaaagttaaaaagcgtaagatgttatacaatggaattaaattagaaattaatcataagatatctagaaaatctacaaatatctggaaattaaataacacaattctacttaatactggggtcaaaaaaaactcacaagagaaattataacatatttttggtgtgccctgcccatgcccttctgctgctttttccaggagcagggaaggagtggagacaaaggctgatgagggtctaatctaaatttaatctcttgttttttttaactttgtatgtggaaataattaaagattcaaacgaaattgcaaagatagtacaagaagttttcaatctcttgtagttttttaactgtgtatgtggaaataattaaagattcaaatgaaattgcaaagatagtacatgaagttttcatgtacctgctagcttccccaatagatacatcctagtacttatagttacttaaaaccaggaaattgacattgtcatttttctgtgccatttatcactcaccacctctaaaattaagatacagaactatcaccacaaagatctccctcatgctacccctttacaatcacaccacctccccatgctaaacccctggcaaacactaatttgttctccacctctataattttgtaattttgagaacattatataaacaaaattatacaacatgtgaccttttgagattggtgtttttcacttagcataatgagagccatctaaatgattttgtgtatcaacagttcattcctttttattaagtagtattccctgtagtattcactgctcccatcattattcacttattgcagaacattttaatgtttctggtttggagctattataaattaggctgccataaacatctgtgtaaggatttttgtacgaacacaagttttcaacccctttgggtaaataccaagggatacaatgctggatcatatgttatgtttagctttttgttttgttttgtttgtttgttttccaagagggagtctttgtcacccaggctggagtgcagtggcatgatctcagctcagtgcaacctccacctcccgggttcaaggaattctcctgcctcagcctcctgagtagctgggattagaggtgtgtaccaccatgcccagctaatttttgtatttttagtaagagatgtggtttcaccatgttggccaggctggtctcaaactccaaagtgtgtttagttttttaagaaactgccaaaccattttccacagtagctgcactattttatattcccatcagcaatgtatgaaagatccaatttctgcgcattctcaccagtatttggtggtatcgtaatttttaaattttagctgttataataattatcttaaaaatatcttattgtatttttaatttccactttgctaatggctagtgatccttttatgtacttatctgcatctgtatagccttttcagggatggaaagagtgccaaggttactgtataaaaaagcattcaggatgggagatattgttgctggcatttctagaaaatacagcctggagtctggcataggttacctggaaaaggcggatcttgagcatgacaggatttagataaggaagaagcaagaaaagatatttttagtgtatactgctgcactctgtcatttagagtttaaaagaatgcagcatttttatttagtcaaaatacgtaaccagaataaaaggtatggaggataggctacttcaatttcaaatagtaaaacttcctcaaaagatctgatatttgtatctttatcccaaaacttgccacctctagtaattgcccacatctctttaacctccacttttctcctcttctctgcagctctatacatcaatctgtctctcttttctttcttataagaaacaaagtagtacattcttaacttctcccaacttcttctgttatcagttcagaaaaatagaaggattatattgtgactgtttattctacgaatgttaggaaaagatacatgttccacatgatatgcgaagaaaccagagggaagagcaggtgttttcaaatagaaagagtaaataagatatcttaaattttcactgagtttcagtgtatggcaatatatttctacctatatgtgcccaattaagtgcacttatggattactaaattcactctcacacaatggctttaaaaggcaaagaaaaggcaaattgaaggtaatggaacaatgcacacacaataccaaacaagaaaatagcacaatctccatcagccccatttttatttaaaaacagtaacaatataatcaagtctggaaagaagctaatcaaaataatttaaaattattttttaaactatttgaaaaaattgcaattatcagtaacaatgaactttattattcattgaactaagatgtaattgtgtacatgtgtataatatatgaatgaataaataaataaataaataaagatcaacaatcaaaaaaggtttagagcccgcttagaacactgaaagtgctgttctctccacctctctcactctaccctaccccctggttagatactgctcttgcaaatgtcaggctcccagcttgagctcctacccagatctcttgagttcctgaagtttctctggtccctcttttccaaggtacaggtgcctggaggaatcctggccttgggtatcaactgaatgacttgatcctgtttttctttgcctcaattttggatagatttcctgagtttgcatctcatattctggtccttcctctcaacctcccatcttgaccaaaactcatcttctagggtgaatatggcccattatttggatatcatgcccacttggctgtcttcttggtacctaagaaagagcccaacagctgtggggctgaaacagaactaagaccaggacagagaatgccaatacctacagttctaacgagtcatttacaatactttgttctaagtataaagttcttaaaatccaaagttaagaaaaaaaatttttataggtaatttttaaaaacagtaacacagcatttcatggaaataccaagaaccaactatccagtaccaagtacatttccaatataatgatacatttacagtgataccattttaaattgataaacattgtatgtatttttggtgtacaacatgatgttttgatgtatgtacatattgtgtaatgattaaatcaagccatttacttcacataccattttttggtgataagaacacttaaagtctactctcagcaattttcaaatatccagtctatcgttattaatgataatcaccatgaggtaaaacagatcacatgataatcaccatgaggtaaaatagaacatattcctcttgtctaactgaaattttgtgccctttaagcaacatctccataatactcctacccttctacagtgatgctttttgagtcacatactccgttagtctattgagtttcttgaaaataatgaccatggcccatgcaactttgtttccccagacctggccttgaaaattacgattaatattattttagttattgttactacttttaaaacacttactatgtgtcaagctcttgctaagcatatcgcaaatattatcccgtttaatccttgtaataatcttatcattcctttttacagatgaagaaactacactcagaagcccaataacttacctaagatcttacaattagtacatggttgaactgggattttaactcaggtctttctcattttgaaattcaaactcttaatacgactactctaatactgagcggggaaagtggggtagggagatatataaaagtttgccactactttccaggccagaagtaatagcatgttcctacttagaaaatgtgacctccagccatgtttccagccaattatgacttctctggcattaaagacactgatcacgacactctcagacgaaggaaatctctaaaatatgtcacagaaaattttcaataagttatagtgacacatgtatccagtgaatgaaatataaaatactaacttttgtaaatgtagctgaggttacttttccttgtgagtctaattactgctggcacataaaatgaagctatttgcaaattcatatctcttaatttggcacaaggcagtaacttaaagaaaaaaactataggtaggcaaaaaaaaaaaaaaaaatcactgcttacagcagcacacaggaccaaagagtgatgcaattttcactacatgtcttctcaagttggagaattcattagcacctgtatagtacttgggtaatttcagacaaagcaagttgcatatttaaccataagttcatcttgctttgtagttctatggcttcatattagaagtttaagtataccaattacttcatcattaaatacagatataaaataaccatttcaagttatttttcttttaagttttgatcaatcatagcattttctaagtaatacattcttttctaagtatacattcttaagagtatattctactattgaaattggttttagccactaaaattagaaaatataccataatgctctttccttttctattctaaataaattttaatttacaatttctttttacaaaaataaacaaaatgtatttatttaatatacatcacaagagctcaatcagagacttaattttaaaaacagaaatgggcaaaatgtcatggctcatgcctgtaatcccagcactttgggaggacaaggtaagagaatctcttgatccctggagttccaggacagcctggataatacagggagaccccatatctacaaaaaaaaattaaaaattagcctggcactgtggcttacacctgtggttccagctgctcaggaggctgaggtggcaggattgattgagcctaggagatcgaggctacagtgagccgtgatcatgccattgcactccagcctgttagagcaagaccctgtctcaaaaataaaataaaaaataaaaaacagaaacaaaacaaaaataacaccacagctcaagatacagagtcctatacagaaatcaagcaaagacagaccatctaagggaaaaatgaagagacaacacaaggagaggttgggcagcccgagttagggctccttcctggagacgtgctttgagtagatttcttgcagatatttcttaaaagctgtggagtttttctagagctcagcagcatgtgtgttcaaaaggctattgatgttgagttctactagcaggctgtggatggagtgcagggtgttcttgacatcatacagggcagaccactcgtccttcaggatgtccagacaggtgttaacactgggcgtccacgttgagatagtagcagggcgtgaggaacttaaccaagggcatgttgtatgggtagccactggggaactccagggaaaccttacatctcaggtcttctgtgccagctgcttcagggatggtcctactgatttcaaaaggttgtctgatgcaggtaaggcagaaattcctttgttgccagagatcacaagggtcttcagctcttgctgtatcctgccgtacccactgctgcactctgctcctttatgggcagcaatgctggtggcagctgtgttgcagttttggcaggccatccaggcagcactggcagggagacaggaactcagagagcatgactgcaactgcctacttttttttttaatggtagatgaaatgcttaagtggactagccagctcctaattgtctcatttcactgaaaactgtttctagtcaacaaggatggatcccatcagccttactgtatgagaaaacctgatccctggccaaaagtgagtgttctgaagtggatacataatctaaccactgttaatctgattcttcctcctggagatgtggaattgagacccaattctaatcagctaaggctgcttgcttaaactaatttgcttcagggagaacgtccccccaccccccgcccccgctccgaaccataaacactgtgaagcaaaagtaacatgggcaaatatgtattatcttaacaaaaactaccagcactataggctgaattacgtccctgccccaaaaattcttatgtagaagtcctagcccttagtacctcagaatgtaactgaatttagagatagggtcattttttaaacttcttcacatcaggtaatgtgcagactggtatcaaggtctgagggaggcacacctcacacaataatgtgaaaacacaatcattactttatgaaacacaaaagaacctaggttctttacagaggtaattaaagtgaagtcattaggatgggccctaatccaacatgaccagtgtccttactaagatgtggaaatgtggacacacacacatacagggggaaggaaatgtgaaggggcagggagatcatttccatctacaaaccaagaagaagcctggaacagatccttccttcacggccctcagaagaagacaaccctgctgataacctaatctcagacttttaacctccagaactgtgagaaaataaatttgctagttagccctagcaaactaacacaaccataaagggacacatccttgtttgagatgcttgggatagaaggtaagaccctgagggaataggtgtcagaagccacagaaacaaagcagatggtaaaactactctggatggcaccagaagaaaactgttttttctgtctccaggaaagaagaggaaagaaagagaaagaagtcagtaagaaaatttgaagtgtagggactttttggacaaagggccaaaagaattttctcaggagggtctgaaagtacccccaacaggaaattctgattatattcctatgatataaacccccaaaccttcaacaaaatctattacatatggaaacagaaacccacagccagaggtgaccatgagaatatcaacctggcattcctccacccccttatctcactgccctctcattcagaaatttgtagaaatctcacagaagccacatgagccccacaaggtatgaaatatggttcatgccaatattatctaaatctcaaagcactaggatattttagctgacacttggaactgcaaagaaagatgaagtagacttgcagatagatgcagaaatgaaagaccaagtgaccctagagagagagaatgagagttataaggctattttctggttctaattcctcatttggccagactgactccctgcttttgaaatacccacatccctatattcctcttgggataactttatagcctcaaaataaatctccctttcttgttgttggttaaagtagctcatgttagtttcatttgtgattaaaataattttaactaggatttatataatatacatatcaaaggacatcataaataaatagcaaaaccagacagttattagaagttttaatctgggctgctattccaggggggacatttataccacaacaatacagtgaataaaagtactgcctcatttttccaaactagtgtcacatagaatacttcactcactattaggtaggggttaataagtatgctataaaaaagaatgttttgaggtcaaatacatttggaaaatactaatacagaataaatgacttctgagcagttgggggagacttttttttaaggggagttgactataagaccctttcttcccactgagtggcagagaagagaaggtacattattggagggaacttaaaaggtaattacttcaacaataacaagtttatacttgttacaaaagtagctaaaataatataatatcaatgtaaggacaaaatctagttcatctctaaggcagtataatgtaatggttaaaacacatgacttctagaactaggctgccaacctctgtaactatttcttcatctctaaataatacttacctcaatgctttgtgagaattaaatgagttactatatgaattagtccattttcatgctgctgataaagacatacccaagaaggaggtttattggacttacagttccacgaggttggggaggcctcacaatcatggcagaaggtgaaaagcaaggaggagcaagtcacatcttacatggatggcaacaggcaaagagagagcttgtgcagggaaactctttttttaaaatcatcagatctcgagactcattcactatcatgagaacagtgcacaaaagacccacacccataattcaatcacctcccactgggttcctcccatgacacatgggaattatgggagttactattcaagatgagatttgggtggggacagagccaaaccacatcactatataaaaagtacttcagctgagcgtagtggctcacacctgtaatcctagcactttgggaggctgaggcaggcagatcacttgtggagttcaagaacagcctggccaatatagtcaaaccccatctttactaaaaatgtaaaagttagccaggtgtggtggtacacgcctgtagtcccagctgctcaggaggccaagacatgagaatcgcttgaacctgggaggtggaggttgcagtgagccaagattgtgccactgcactccagcctgggtgacagagtgagactctgtctcaaaaaaaagtacgtcaaagtggcaaacttctgaaaatgctagttattattatgaagaagcctccctaaaaatctgtaatttatcaacttccaagacaggcttagaactttctagattttatatatcagcttaaagaaagtgacccattcagggcagggcgctgattataggtggctcacacctataatcccagcactttgggaggccaaggcaggtggatcatgaggtcaggagttcaagaccagcctgaccaagattgtgaaaccccatctctactaaaaatacaaaaagttagccaggcacagtggcaggcacctgtaatcccagctactcgggaggctgaggcaggagaattgcttgaacttggagggcggaggttgcagtgagccaagatcgtgccactgcactccagcctgggcaacagagtgagactctgtctcaaaaaaaaaaggaaagtgacccattcagaatgaaccaacttgagacacagaagaagactggccagtgacaccacagaaggccaaaaagtcaagaactctgattagaaccaggacaaagggttttaaaatatgctgttgctgttgaaggggttggtagttaacgtagagccacaatttagctatagctttatagtatttcaattttttatgtataattatttttattatgttctgattcgtatcccatttagatggcattaaggatatatactgtacctggggacaaccacttatatttgcatggctgtcatatctccaaggtcatgttaacagggcctaaataatttttctaatttaatgttaactcactttttaaaaaaattttttgtttatttttagtagagacacatttctctatgttgtccagtctgctctcaaactcctggcctcaagcaatcctccagcctcagctttccgaagtgtggggattataagctaatattaacttactttaatcgtgtgtagatgatccttttcttaactgagataatgacttctactttggtttcagacattttttgaccactattatgcaatttcttttttaaattttgttttattaatctatttttaaatttaaattttaatttatttttatttgtatatattcatggaatacaagtatgactttgctagactgatatattgtatcatgtaatttcttaaactaataatgcttatcagaattatctcaaatagatttttactcttggaggtattgtaaactagtattaacaaaaataaatcctctcaaatctcaaaaatgatgtaattatatacagaaagatagccaactgggcttttctttatcattctaaatagcaaaagtaaaactcaaaataattggtagaatattttagatatttcaaaaatatggaataaaattattgtgatcagaaattctacttaaaaatataattattttgtaaaaattgagtttacctaaaaccataaaagttatagttgttatgttacatttgcttacaattttccttgagaataggattctgttacctcacccccaaaattatttaattacaatactgagatatgtaagggtccatcagttattctgatcctataaaaattatttaaaacacttacaaatgtgaatgcagaacactatcttccacataatagtttcttgagaactctccatattttacacagaatttttcagctatacatgaccttataagccaaacatttcaactccctcattttaagcaaactgaaaatcacaataacgatacccaaagtgacagaatagaaccataatacagacctccagctccaaagttctttagatatttcttctgcatttcattaatggttttatctaggtttgatttttttttttttttaagacggagtttcgctcttgctgcccaggctggagtgcaatggcgtgatcttggctcactgcaacctctacctctggggttcaagcaattctcctgcctcagcctccctagtagctgggattacaggcatgcatcaccacgcctggctcattttgtattgttagtagaggcagggtttcaccacgttgatcaggctggtcttgaactcctgatctcaggtaatctgcccgccacggcctcccaaagtgctggaattacaggtctgatccacaaagccaggctaatttttttttcattagaaaaattgcttatataaatcagaatacaaacatgctttttttttttttttttttaagacagtatctcactctgttgcccaggctggagtacagtggtgcaatacagctccctgcagccttgaccttctgggctcaagcaatcctcctcttcagcctcccaagtagctggcaccacaggcacagaccaccgctcccagcttctttatgtattcttgatataagccctttatctgatatgtcatttgcaaatattttctcccagtctatggcttatcctttcatttcttaattatgacttttgaagatcaaaagttcttaactttgtcaaagtaaaatctatgaattttgttctcttgaatcattcgtttggtgtcatacatagtaagtattttgtataactcaaggttacaaagtttttatcctaaaaattctgaagttttatattttatatttagaaccatgatctaagttaacagttgtataatgtatggatagttcttttttatgtaaatatccaattcttccagcactattgttgaaaaaactgtttcctttctcctgaattatcttttcacctttgtcaaaaatgaattggtcatatatgtgtggctctatttctgaactctctatacattcttactgaatttttattgcctatgccagtaccataccattttgattactgtggctttatgataaatcttaaaatcatgtagtgtaataagtggtgtgctgaaactggcttgcacccattcacaagaactgatcttgtatatctcttccgtaccctgtgttcagtgatgtcacattagtagcttgaaatcagccatggtgtatttataccacaaaagtatttccagagagctagttgttaaacatcagcacatcactaggtataaattatctatttattcaaagttgttctgacttggcatttcaacataaattttagaatcaacctgtcaatttatacaaaaatgctaggatgtttactaggattgcataaaatttatagatcaatttaggaggaaattacatctttttttctccctctgttgcccaggctggagtgcggtggcatgaacacagctcactgcagccttgaccccctgggctcaagcgatacccccatctcagcctcccaaagtgctggaattataagcatgagctacaattcccagccaagaaattatatcttaagaataaagagtcctccaatccatgaaccctgtatctctctctatttgagtagtctttaatgtccatcagcaatattttatagtgtttagttacagttctcacacatcttttgtaaaatttataccaaaatatttcataatttttggtactactcaatatactattataaatagtattgtttttcagattttaattttaggttattcattgctattatttattattgtttttgtatatcgatcttgtttactacaagcttgctaaattcaattattagttttagaatattttttgtagatgctacagaattttctacacagatactcatgttacctgcaaagacagttttacttcttccttttcagtctacatggccttttattttttcttgccttttttgcctcagtctttcactatccccattaactatgatgtcagcggtaggtttttcatagatgccacttgtcataatgagtgaattccattcctagcttacaaataccttttatcaggaaagtctgttaaatattgtccaaaattttttttgcacctattgaaataatcattggcttcaatttgctaaaatttttagaattttataactatttcataagaaatacgaatctataaaattcttttcttgcaatgtatttaattttggtatcagagtaatgctggccttataaaatgaattggcagttatttcctcctctttgattttctggaaaagtttgcattaaattggtgttatttcttcctggaatgtttgtaagaattccagtgaaaccacttaccagtgaaactcttggcttggaattctttatggttaggtctttaactacaaattaaatttatttaataaataaaaggttatttcttcttggattagctttgatagtttgtgtctctcaagtaattgtgtctatttcatctaagttgaccatactgacataaaattcataatatttccttctcacacttttcatctgttgcatctgtattgataccacttctttcattccaaatattcaaaatttgtgttttctccccctaccgctaatccttttttccccccggatcagtgtggctagaagtttaaatcagttgtattgattcagtcaaagaagcagcttttggttgtactgattttttctatctgtcttccagttcattgatttctactctaatttttattattttctttctcttctttttctggtttcttaaggtggaagctgaggtcattgattcgagatctttctttttccaacatagacatttaatgtctatattttatttaaaacacatttagtgttataaatttccttctaagtactgctgtagcaacatcccacaattttaatatgttgaattttcattaccatctagctcaaaatactttcctgtttgatttcatcactgacatatgagttatttaggagtgtgttgtttcgtttacaaatatttggggaattccccacacatcattctgttattgatttctaacttaatgccattgtcatcagaaaacatactttgtattacttgagtctgtttaaatttgagacttgttttatgacctagaatatagcctaacttggtcaatgttccatgtgcacttgaaaagaatgtgtgttttgttgttttaaagtgatctacaaatgtcaattacatctactaggttgatagtgttaattaagccttctacacttttactgattttctgtctacttaccctatcaattattgaaagaggagtattgcaatcttcagatataattatgggatctagttataaatttttcctgtactcctttcagttctatcagattttgattcgtgtgttttccatttgtatcattagacacatgaatgtgtacaattatattaggtacccctgatgaattcacccttttatcattttgaaatgaccctttttatccttagtaatatactctgatctaaaacctattttgtctgatagtaatatgagtatcttttgattagtgttgccatggtatgtcttttttggtccttttacctttaacctatttggttttttatgtctaaaatatgtttattgcaggcagcatatagttgggtcttacatttttaaccaatctggcaatctttgtgaaatcactaaactctacctgggttactgacttcctttctactatcatatctttactttccaatatctcttttttgttctcaaaaagttctacttttggatagcctttctattcttgttttacacaatcagtaacttgtcttatttctttgaacatattaatatagtcaatttaaaacactattctattctccgcattgactgttttttctatgttcattttacctgttggtttctcttcctctctctttttcatgttacatgctctctaatcagtcattgatttatgttagggtgatgttaactgatagacttaatattagggtaggatttctcaactttggccctattgacattttgaactgaataattattttggggaacaggaagatgagcttccctgtgtactgcaaaatggttagcagcatccttggcctctatccacgagatgccagtagcacacctctgcgcatatctttagttattacaatcaagtatctctccaaacattgccaaatgtcccctgtggggggaaaccagtcctagtttttagccaatgcattacggtgatcagggtcttgagagtttctcagagaagttctccagtttcctactttgtgagtgaagaatatgaacctagtcactagcatttggaaaccaagcagatgaacagacataggtatctcaccaaccaatacacagactctgacttaatctctctggtaggcagaataatggcctctcacagatgtccacacatcctaatcccaggaacctatgaacatgttatgttacatggcaaaagagaatttagatagcaggtagaattaagcttgctaaaaaattgaccttaacaaagggagattatcttggattattcagttggatttaaatacagaagaggagggcaggagagtcagggacaaaatgatatgacatgaaaaatccattgctggctttgaagaagtaaggaagccatgagccaagtaatgcaggtggctgaaagaagctgggaaaggcaagaaaacaaaatttctttctagagcctccatgaagaaagacaactctgctgacacgttaattttaacccgctgagattcattttggacttctgacccctggaattataagatgataaatttgtgttttttttaaaccactatatttgagggttaatgtgttatagaaccaataggaaaaatcatataatcatttgatttcagtatggtgctttagcatccactctcagttctgcttagtattcccaaatctagaacaaacctgagataatctcttctaccatgaatcaacaagtcctatctatctctgtcaaggttgaagaatccaggcttcttcattgagatgggaccaacggagcaaactgttgcttaaacagattttcaaccaatccttccattccaagcccactctactccccaaggctatttaaggggaacttgtacctccaaatcctgagtttttccagcattctacagtagagacagacatgcttttatcatggcaagtagtcagacttcctctctattctgctaagtcaccactcattctcattcctccttgcaaaaacacatagacgtctcttatccgctacgtctctcaatctttttggtctttaagggttcatgcagttttggtttctctactgtcattttactgggatttcaagaacaacagaaataaacaagttcacctgcaatgtttaactagttttattttcagctgacattttatcaagcgcttactgtgtattagatttgcagataaacctttatataaattatcatctgaatcttgtaataactctaggagataggtactattattttgcttcccattttataaataaaactgatgtttgattcaggtgacaaggctagggtggaacagaactgcgatggaacccaagtctttatgactcaaaagccaatttgcctagacaattatgcaatcttgttaatttttcaattaacaattcacaggttttactctagattagaggtcagcaaactatggtttactagccaaatctggtctgccccttgttttgtaaagttttattagaacatatccataccaatcgtgtggaaaaaagcacactcaaactcaaagtactttttctattctctcactcaacaccaagaattaacacagaagacttctgcagccaaatgtgtggagattttcccctaccaacaagcaagtaatgaattctgcagcagataccaggtaggtatcctccaatttagttctgacactatctacctagaaatcaaattccacaagttggggctcagtaccgaaagactgccccctacttctgatgccaacaagtcctgggttatttttacctgtgcttttaactgattggttataaattggggatcccaagaccccctccttggatttgattaatttgctagagcaactcacagaactgaagggaaccatttacgtttaccagtttacagtaaaggatattgccacaggtacaggtgaagagagtcatggggtaggcacgttagaagaggtgttgcacttccctgccctctccagtgcaccaccctccaggaagctccatgtgttcagctatcggaaagctattgtgtcctttgggttttcacgggacttcattacataggtatgattaaaccattggccattagtgatcaatttaacccacaggttgtagggaagggctgaaaatcctaagcccctaatcctgccttggtctttctggtgaccagcccccatcctgaagctacctaggggttgccagctaccagtcaactcattagcatccaaagacatcactttggagagtaaggattttaggagtcatacaccaggaaaaagggtcaaagaccaaacacgtatttcacaatatcacacccatttaaatgactattgtctatgcctgtttttgtgctacactgttacaactgaatagttgagacagagacaatctagctgacaaactctattagtctctgctcctttaaggaaaaatctgctgaccctgctgtagaaaataaccttattaccaagttttgaattcatggtgtcctcatatacttaacacttttgttactgttatcaaatcaaaggcactatttttattgttcctttagccttttgttaccctgcagatagaaatctttggccatggtttaaaaagaaaagcctctaaacccatctcccatgtgaagtcttccccatacttatagtcatactcactcccatttctgagctcccatctcaattattataattacagtatttagtggagtttgattcatatagtcattactagttgtgattcccctgagatctagcaactgcttaactctgataagcatttattaagtaccttctaagtgtcagtcagtgttctagacactagaaatacaaaaataaaaatggcatcttttggttcatatgtattctttttaattaggtataaaaatagaaaagaaactgagcatggaattgtgcctatggtccctgcaataattgcatcagaatcactagaagtgcttgggcaacattcctattgaatgttgaagcagaatctgcggtggttaggcccaggaatctgtgctcttaatcaacacttcagatgattcttaagcacaaaggtttcagaaacactatgtcagtagacaggaaatactgcttctaaatgtgcaagtattatgagagagtaagaacaaatcccacatgatctctcttaatacaaaccaatttctgtcaaaatgtaatgttttgctgctcatttcttctttccaaaacttactagacacgcttaatcgagaactttgacgttgctctcatctttactaattttacttacattgtgaaccctgtacctggcacagttcttgaaacatagttgataccaatactttgtgttgaactgttgaatattcagagcaaaacctttttaagttgtccctagtatgtagaagtaggagtttttccaattttagactggaatggtatgaggatcatttgagaacaaggaagataacacacccaggcaaatgtttggtcaacctacaccttgtttctctccttctagaaatgcttccttctagctctcaagcccactaccctgtggggaatatcaatctcgctcctcaaggctaagctagatcaagcaaagccaagcagactagtggaaaaggtcaggcattataggatccatcttcatcataggtaatctatttctagaggctgtagtcaagagaatgccctagaatacatgtttaaaaggattacctacctctgaagataatagaccacttgcttatatatgtctaccacgagagtcttataacaatggactcttgctatacctgacacagatctacccctcccactagaactctgaattattttgctggaggctacaacattctgagtagtttgttgggagttgacaggaggtggggataacccacccagtacaagcttagcagagctgagccgctgcagcaagttgggctagcctttgatacagactggttggacaggttctggatctacagaagaaccggttttactggcctgttgtgccaacatattctggtttgattccatgttccacagacggtagaaacctgcccagccagttaaatgaaaggcatattaggttatccattgcactcagtatatagcttagatgcagcagaactcttccacatagcagtagtgtctagcaaaccagtgtggtccagagaggtggtgttcactgatttaatgtttaagttgatagattcagggaaagtgagcagtgaaacaatttctgcttttcaccaagagcagaggttttctaaataagtcgaagggtaagtatatttttaaaatttctcagtttcctatgcattttggaaagttaaattaagaaatgatgtttaaaaagataatcaatttttaacatagtaatacctgcattataccttttctgtaaagctagatattgttttataacacttgcgttatgttcattgattgtttgcataaaggttatttggtatataatattctcttactatgcttttctgtaagttgtgcatggctatagtcattttaaaagctggactgaataattttgccaaataaatttcacatattaatgatttacattaagccatctacttccttcataatgtaactattatgttttataggctgttgctatatggtaacaattttatatggtaaatctaattgtggataaataataattgcccttttaaggccaaaaaaagcattggccggctggtgatcctaagtacattcattagaggaacaattcacagtaaaaattgaggagtgtgaaaaacaaagaccgtggaatctggtaactgattaactattggagctcaaaagcacttgctgagctgaatagaaaggaatgaagacaggttttgtcatgcctattaggtctgaaaaactttttaggttaaagaatacctggatcttcctttcatttatattaaaaatcttccttttatctctctctttacgtaatccaattaatttattttagtagtttgtatcatgtaaaatgaaagttaccaatccctttagatttatgttggcataccatcctacccctttatttactgatattagattgaattgaagcacatgtcttctagggcatttaatttaacataacagctgacatatgattttatctgggaatttaaaatttttttaacatattatactgaatgctttcctgtcatcttagtaggactttgctttgagctgagcaagactgatgcatccttttcattgtccctagggttcccactttgtcactatgttcaaactcaaaggctataaaattattttctaactcaaaggctataatattagtttccttaggatgttgacaaagaataaatttaaaagtgtgaataaatgttcagatgagatttcattttttgcagggaaaacccttggatgcttcatagtcctacttctaggcagttctgcatgaatttctggtaatccaggtaaactgctgaaaagctatgtaatgttgtatctgcaaaagcaatgtgctgattcagcaagccaatattaattttattcagcacaaattgtattttgacaagtttttggtaatatggatcaaaacttttaattggctgaatttttctgaatttactacatgaaacctagttttcaggtaatatatatataccaatagagcacattgttagtatttctggtgaatatattgcatatgataatttaaaaaatttaaaccacaccgtgtttaaaacatagggcttactgtttaaagataaatttaatttgggattctaatttatttattgagcattttttatgtttatggttttgaagaaagctatttaagaactagatatacatttatataaaatccatgggtaaaatttcaagcttaactctgtattttgggagaggattttacaattttcatttaatggaattttcattttcaaatatatgtaagtcctattagatattactttcatgtattttccataaatttagtcctttaaaatattgatacattgcgatatttttgttaaaactgaggatatataaatttgtcaatcaaattaggagtgtgtatgtattttatacagaccaacatacttcagcgcctagtcaaaaagtattccactcatttaaaatttttttactcttttagtcgaggatgcatttctttttattcctagctgcacaatttcgcataactctttctgtcaacaatgctagctttcttaacaactgcaacttctttccctcctgaatatcttcatgtgttttccactaaaagcacttagaattatgtcattttttacctaagagggacatttaaagaataaccaatgaatccaatatctcatttttgagttaagaaatgaaaagccccaaaatatagctaagtcactattatataatctaagggtagatctggggccagaacatccaggtttcctgacttccaccaagaccagtaattttttcactaccctacattgactcttctgaatactacatgaaatctaatctaaaaaggtaaaattatgttgtatagtgtgttaatgaatctttggtgaactaaaaaatcatttgtttttatattttaatctataccattattgccccaaacatttttgggacaatggctgaatatatatgggattgccattgataacaaaggtgactaccacttcaaaccccaatctcttaatgccatcatattattttgtttcagactgatgaaagcctcacattctttcatatttgcccaacttgtggatcccgctctcattttctgactcaatattgctttaagctgtctcaactgtctattttcttagtatgtatatatttttgtattattttagtcattcttaaatgctcataatttaggatttgcctaagttaatatagtattctttaaatttggttagaactgacaggaaaattttgttatgaagacagaaattgcaggacttaaaaacccatcttagaggtgatagaagctgttattgaaggggtaagctttgcacacaagtgctcaaaaaagttttaaacatttttaatttgaggaattcctaggaaatgtgattacagaaagttggagaaccaaaggccaaaaatttcaattctgattcctggtactaaatgttaattctactaattaccttatcttatcacaggtaaaatcctacctggaaaatgcttctaaatttggtcattttagttcagtccaagtggactctgaaaaaaatcgctttcatttgtttcttaactttacaagagaaaaggcagtatactgaaaagcatgtgagcttttgagccaaattgacatgggtctgaataactctgctacaaattacgttccccttggaaattatttaactctctgagttagcttttctccatctagttaaggaagttaagttaataccattctttcagagttattggaagaattaaatgagatatcatgtaaaacacttcacatagttcctagaacatagcaggtgctcagcaaatgtcagtatccttcttaccccttttacagactatataatacatttcaacaaatagcttcggtatttcctgaagtatttcagtattttctttcagtaagagaagtcaactttaacttagaatatgcacgtttttgtcagaaagataaaaataaaatcagcaatcttggaaggcattaagatataatgttggggccgggcgcagtggctcactcctgtaatcccagcactttgggaggctgaggcagccagatcacaaggtcaggtgttcgagacaagcctggccaatatgatgaaatcccgtctctactaaaaatacaaaaattagccagtgtggtggtgcgtgcctgtagtcccagctactcgggagactgaggcagaagaattgcttgaacctgggaggcagaggttgcagtgagccaagatcgcgccactgcactccagcctggtcaactgagcaagactccgtctcaaaaaaaaaaaaaaaaacatataatgttggaaaatattttaaccttcttaaatttaaaaaatcagaaacccatataatccaatccaattaaagattcacttcaaagaagtctttgttaaaagtattttgagagtggtacaccaagatgattaaaagccttaaatactttttaaaaattcaatttcaatcatctgtactaatggaagaaagcgtgacatggataattcaaattataatgcattcatgcatcaagtaacaacagggatacattctgagaaatgagaaattaggtgatttcattgttgtgtgaacattataaagtctacttacaaaacctcaatggcagagcctactacacacctagactatatggtatgtcttattgcttccaggttataaacctgtacagtatgctactgtactgaatactgtaagcaactgtaacatagtgtgtgtgataagtatttgtgtatctaaacatatactgacatagaaaaggtaccgtaaaaatatgtggtattataatcttataggaccactgtagcatttgtgttccactgctgatcaaaacactgctattcagtgcatggctgtaccttacttgtgccttctgagttttccaacagcttttttttgtctattatctaacatgacgtcaaattaattggccaagaatttattttctttcttctttttttagatagggtctcactctgtcacccaggtttagcctcccatgtagctgggaccacaggcacatgccgctacacctggataatttttttaaaaattttttgtagagatgtgttctccctatgtttcccaggctgatcttgaactcctagcctcaagcaatcttcccacctcagcctaagaatttctatatgctctaaggattgtgctttttctactaccaagtaaattattctttcaggactctggaatgtgttttctcctacaaaaaaattcccttctgaattaaatttattataggctaatattaaattatattgcattattttgatagcaagtaatgatgagcagagtgagtccaaaatgtatagagcacaagaagatagaagaggatttaacattttctaaagataatattaaattagtcttagactgattaattgattagggaatgaagccgatgagcaaagatcacaaaggaggagctttttgtgaaatgtattggtcagagggagttcagaataccacgacaaacattctgagagcttgcttaactaaaaagaggtcaattgacacatcttccaatgaatgaataaagagcaaaaaattggtttagagttaacattagaaccaactaataatccatttataacacaaactgatcttattgagctcttgtaatcaactttaatttcctgaaagatgtttaatcgctttacaaaaagctttctgctgatgctataatttcaatttaagtccacgataaaagaatcttttcacttaaattgtagacactgtatgtagatggtgtgcagaaagacaaaagcatcatttcaccaatttagcccactaattaatcacatattctttttttctttttttgagagagagagtctcgctctgtcactcaggctgaagtggcatgatcttggcttactgcaacctctgcctaccaggttcaagcgattctcctgcctcagactctggagtagctgggattacagggacatgccaccacacctggtgaatttttgcatttttagtacagatgggatttcattatgttggccaggctgatctcgaactcctgaccttagatgatccaccctccgtggcctcccaaagtgctgggattacaggtgtgagccaccatgtctagcctaattaattatatattcttattaaaactattttattagctacgtaagcaatttagcctatgtgactagtcattaaaattagtatttaatttgcatttacttttaaatgtttacagtagatattactacaaacaattgcaaagaaggcaggaaaaaaacaaaaattttaaatatgtttttaaaatgttctggtggggaatggtggatcacacctataatcccagcactttgagaggccacggtaagcggattgcttgagcccaggagttcaagaccagcctgggaaacaaagtgagacctctgtctctacaaaaaataaaaaataaaaaattacttgggcacagtggttagaaggatcacttgatcccaagagatcaaggctgcagtgagctgtcttcacactactatactccagcctgggcaactgagtgaaatgctgtctcaatagataaataaatggttttatacaaatagctaatttgcataactcaagactaacaactaaactgcctataaatccaaaactgggaaatagagtacataacagttcattgtgttaaagacatacagccttaagaacaaccagaaactattatcttagaaattatgtatcactgacaaagtgaaaatgtaacttgaataacaaatttttagtttcaaagttataccttaaatctattcccttgaaagttctttgcctatcatatctacaatgattcagattaggagtgagaaacacttccttccaacatgaaaatattttaaatctaatgaatttctcaatgactctcgaaacattaagaaatataagattgattataactttatgtagctaataatacccaggagtattactactataataacctagcaatgtttctcaaagtgtagtccatgaccatctgactcacctggaggaatgcctattaaaaatgcagatcgataactccattccaaacgtatcacattagaatctctggttggtagatcctaggagagcagcaagaaaagattcttctgcctataacagagaatgagcaagtgagtgaatcttttcaaatctaacccattaacattatcagaaaaataacctcaaatgcacatgttcaaccaatcttgggtcattaacattcttacaaatgactaatacaattaatctgcctgtcccatccatgcatgcaaatttttaaaagttgaaacttccattaataattcaaaaatagtgaaacagaaatctcaagtttccccttttactctaggttctccatgagagtaagagcctgagacctctggcttatgtgcgagttctttatttgggaaagcacccagaaacaggagtaagggattagtgaaaggaaggaaggaaggccaatacaaaagttcatccttgagttcatccaccactatgagcaaacagagctcaagcccagtatcttcttaggagccatcaaactaccccagaatagcctgtcagaagacacaagagaagagcacttatccacaacttctgacttccatcagttaagagttgccgcatgggttgctaatttcttacactttcaagttgcatacttgtttctattggcttcagagaagctcctaggacagaaagtcaggtgagggactgtaaagtttcacctgcatgaatctggttgccactgaaatacctggagcaagcagggcccaagacgtgtccgatacatcatgttataggacaaatgtggtcaaactgcttttcctttagttttataattctaatacaaaatacaattaaaacagatgttctgagaaatgagtacagcaatttcaaatggagaggaaggaactttagcctatttttgtctgatgtatttgatccattcccacaaaacctgagatgcactgaaacttgatcttctgtgagaaaggtattttctaataaacttcaatttatttcctgaatttgcttgccaatttttaaagggccaaacagcagcaaaatggacaattagtatgtacgctgtaaatacttttatgtccagcattgatccaaagactttattgtttaagttttcacactagtaaagttatagtaaaaacagattgactacattggaccctcgagtaacacttttcattacagtgaaacacacaattttgaatagtacaagtttgtcttggactgtgtccaagagggtctagttacaagaagtaattcattataacctataatgtgatcctgaggcttggctctgaaaaacacattatatgaaggctctagtcaagcagattaaaaattttaaaaccgaacagataaacagtactttaattaagtaaataccatacttgtttgtataatatgtaaacttagttcagagaaagcgaaggagaaataggtgcaaagaaaaaagaaatctgaccaaaagcacatcatctttttgtttaacttgaatttctgttagaataactaaatgtgagtttaaaaaaaaataacactatctccttagaagttaggtaaagtagctaatgaactgaataaagatgaaataggaaaactgaagagtgcacagcaaatacaaaaaagtggagacacacactgctgaaaaaagcccaataataacagatattattttattattattaatttttttgagacagggtctcactctgtcacccaggctggagtgaggtggcaagatctcagctcactgcaacctccacctcccaggctgaaacaatcctcccacctcagcctatggagtagctcggactataggcacgcataaccatgcccagctaatttttatgtattttctgtagcaacggggtttcctcatgttgtccagtctggtctcaaactcctgggctcaagcaatccgcctgccttgacctcccacagtgctaggattacaggcatgagccgccgcacttggccaataaataatttcttataaccactaattctgaaataaataaagagattagtttctcctttctatataattttgccattgggttagatgattttttaaatcccttggaatataataaaactaataacaacaaccatataataatactatctaacttacctgaactcaattatgtaaatcaagataatacatgtaaaagcatttaacaatatagtgtaattctttctataattataaatctttcacaatttgcctagcaattcaatagtttcactataactatacaactttagccattgaagagatctgattagctgtagctcttaaatctatctaccgttaacaacagtttcttacattgttacagtttcttacatatatatatatatcttctctctctcatttaatcctatcaacaatcctgcaaaacacttaaagtacatattattaccttcatttcattgatcaacaaccaaagtacagagaaattaaattatttgctcaacaagattagaattaaaaattagaattcattcagcaaattagatggtgcagctgatgccttcccagtatcaacttatacaaatacattactatacacttgcagttatagaactcaacaatgattccccacagtatagcctttgcacatgccttctgcctggaaagccttctgccattcttctcccaataggcaagctgcttcaaatgtctcttaattcttctttaagaaatttcaaatatattatttcattcttacaacaacccctttgagcacagtgagtattaatatcctctttcagtgagggaaataagacttgtctaggaaacatgcagataatcagagatagggtcagaatttaatctctcatcctatctcccagctcacgactctttccatagtacaagaaggctgggaatatggttatatgccagcactgactgtagaacatgatcacaattttttggagcacttcctactctgtcccttctgagattacaacataatttaagacccttcaatctacttgattttaaattttgtacatgaaacaactcacaaccagggctgggaaagctagtataaccattgttctaattctattagaagtaaatttatattcatttctcaaatgtacatatctattacaaggcaagtaaaaaagcatatgtgccaaaaatgctaagaaataaattagcctaaaaaatgaagtgagatgattataataggtgtttcactccaatcctgactgagaaagtccagtttattttcagctctgaggctaattaaattacaatcaaattttaaagtacttttagttacctcctacagtgtaaagcattttttagttagtttgtttttggttttttttttttttttttttgagacggagtctcactctgtcatcaggctggagtgcagtggtgcaatctcaggtcactgcaacctctgcctccctggttcaagcaattctcctgcctcagcctcctgagtagctgggactacaggtgcacaccaccacacctggctaatttttgtgtttttagtagagatggggtttcaccacgttgacgaggatggtcttgatctcttgacctcatgatctgcctgcctcggcctcccaaagtgctgggattacaggcatgggccactgcccccagccaaagctttttgaagtaaaaagaaaaatgtacttgctctgtcacccaggttggagtacagtgcatggctcactgcagcctcgtcttcctaggctcaagagatcttcccgcttcagcctcctgagtagctgggaccacaggcatacacaccgtacctggctaatttgtttttattttttatagaaacaaagcctcactatgttgcccaggctggtctcaaacttctgggctcaagtgatcctcctgccttagcctcccaaaatgctgggagtacaggcatgagccactgcatcaggctctgaccatatggtttacagtcatccaaaccaggatgttttttaaagtaaaagtgagctgtattaataattaagctagagcaataggaatcaaccaggactgtcactggtaagctagggcatatgatcacctcacataagaggtctaccataactgagaaaaggaaggaagcttttttttttttcttttttttgagccagggtctcgctttgtcacccagagtgtgagcaaggctcactgcagcttcgacctcctgggctcaagcaatcctcccatcttagcctcccaagtagctgaggctacacacaacactgaacccagctagatttatttttattttcttgtagagacagggtcttgttatgttgcccaggttggtctcaagcaatcctcccacctagacttcccaaagtgctgagattgtgggcatgagctgctgcacttggccggaagcctatctatttcaattttagtatcctaaatagtccacaaaaacaaactgtcaccaagagtatgaactgaattaaaacacaatttcactgtacatttttaatctttctgattataacttacataaaactgaaaacatttctagctaaaactcaggatctcctttaagtactgaacgttgaacataaaacatttttaaattttttattttacctttggaaaagtaactatcaaagcttccttaaacttagattaacatggattagaaaaaacaaaaagccaatattttaaacaaagtcttttttctcaagcataattagaataaagaccaaaaaaagacagtgcgtttaaagatatatctgtaatctgtgaagcacataattacattaaagatcacaactatttgctggcagtgaataaatccatcaattcacaggtgaaaaaaattagtgtttaagatgcgatgattttttcacatggacaaagcaatgaatattaaacatgtttgcttgtgtgaacctatcaaagaattctttaattaatagaatccaaatgtcactgacttgttccgacggttagcccttcataatattttccattgctgtaaataaatattactcccacagcttgtatcatggtagcattatacataggtacaatgcagtataatactttaatagacaaaatggtaaagatttgtttttcgagattctgaaaataaaataaacttttttactctacagtcttagtgatcactcttaaattatcttattttttcagcagttaagttctgagatccttttaagtgccagggttagaaaaaaggcttatgggctaaccaactaacaaaattcctgggcttcataagcttatatgaatagatacgaaatattgtccaaacagccactgcattataaatagatgacatggaagaaacaggtgtccctttccattcataagaaatcattttgctggctgcggtggctcacacctgtaaccccagcactttgggaggccaaggcaggtggatcccttgaggtcaggagttccagaccagcctagccaaaatggtgaaaccctgtctctactaaaaatacaaaaattagccaggcgtggtgccacatgtctgtaatcctaactactcaagatgctgaggcaggagaatcacttgaacctgggaggcggaggttgcagtgagccaagatcgtgccactgcactccagcatgggggataagagcaagactctgtatcaaaataaataaataaataaaaaagaaaccattttgcaaataacagatcaacaacgttcttcatcaccccattataatttaaacctgggcaactatgaatatactgtttaaccttctttatcaagtataaagagatagttcctaaatcgggcaaattatgtgccagtaaaactttggccattactgatgggaaatgaagcagcttggtgaatgatgtttaaaaacaaacagaaaactatttcaacagattaaaaagggaaacgaagaaggtatgaagtccaatgtagctagagtgaagatcaaaataaagcttccttatctaaactggaaattggccaggctacacgagactaatctttctaattaaaaagcaaggtatactctttaatgtccattatgagcatttaaatgaacacctagaatattgtcaaaataaaaactgtgatgctgacatcttccaccaatgttaaatatatatttttatacaattataaaacttctcaatctggaatcttggcaccatcaactcaaatcataaacaaaacattttggcacttgaggcaagatcactgattgatgtatactcccactcacaaacaacacttactaattactgtaaacaacttttaaaaaattgaatcaagtgttcattcaagttaacacaaatgttgccagttaagatacttttcttttgtcttaaagtttctttccctcacctctcaaacagcctttgttgtgttcttaaaatagttatgactgcaggtataacaattcaccccagtttaccagtattgtgtgttcatgtcagagatactagagagttttagataaataatcataaaggatttaatcacttactttttaattttatgcctggagacacaggcacttaatgctgggtgggggatgggatgatgcagggagcaggacagagatgggaaatgcccagcacaaatagcagaaataaacgaagaattggatacccacgtcccagttccatcctgcttctttaagtaaatcacacaacctcatttgttcactcattgattatattatatatgctgggcctgcgctgtacgatacagtagccactagtcacatgcagacttgagaacttataatgtggctagtctaaactgagatgtgctgtaaaggtaaaatatataacagatttcagagacttagtatgaagaaaaagaatgtaaaaagtctcattaatttttatattgattacatgtttaaataatattttagataaactgggttaaataaaatatattaagttaatttcacctgatttttacttaaaatgtaatttttagaaaatttaatattatatatgtggctctgtgggatagttctgtgctaagactctagtaaaaagtaggaaagaacccaggaggcagaggttgcagtgagtcgagattgtgccactgcactccagcctgggcaacagagtgagactctgtctcaaaaaattaaaaaaaaaaaagcaggaaaacagggctgggcgtggtggctcatgcctgtaatcccagcactttgggaggccgaggagggtggatcacctgaggtcaggagtttgagactagcctggccaacatggcaaaactccgtctctactaaagacacaataattagctaggcaggtgcctgtaatcccagctactcgggagactgaggcatgaggattgcttgaatctggagggtgaaggctatcataagctgagatcgcgccactgcactccagcctgggggacagagtaagactttgtctccaaaaaaaaaaaaaagtaggaaaacagaagaataaagaaagcacagtctgacatcaaggagcccagctgaagattaaaaacacaaaaataattacaatataatggtgttaagtgcaatgataaagatatatattgagggcatgggagaatgaggaaggccatttgtgaaagggtatagaaaggaaggatgaagagagatgttaggttagtcgcctgaaagaggtagtgcctgagctgagacttaaaagaataagaaagatgaagtgtaacaaatgggggtgaaagtaattccaagagaaaaacattgtatgagccaagagtaagacacagccaagggaaggagagaggaataaaagcagtttcctgttgaaagagggaaagagcaaggggtacagcagagactgtgcaaggataagagcttgtgtgacattttaaagaaactgatttttaacctttaggcaatagcctttttttcttttttttttttgagacacagtctcgctttgtcgcccatgctggagtgcaggggtgtgatcttggctcaccacaacctccgcctcctgggttcaagtgattcacctccctcagcctcccgagtagctgggattacaggtgcctgccaccatgcccatctaatttttgtatttttagtagaaacagggtttcaccatgttggccaagctggtctcaaactcctgacctcaagtgatccaaccacctcggcctcccaaagtgcagggattataggcgtaagctaccgcaccagtctggcaacagtcttttgaagagttttaagcaaaggaatgccaggatcagaaataatggtttagatgttgggcagctgtgagactgaattaaggtgaacaagactggaagcagggaggctgttgcctaggtaagaaacatcagggcctcaactagggcaataagtgaggttggaaaggaaagcactaattcaaaattatatttaagaggtatcatcagcagaatatagtgcctgactcgtcctgacaccatggaaaggagtttggattttattctagggtgatgggaagaccctgaaatgctttaagcagggagtgtgattttctgatagattttaaagaacctctcagactgctgttggagaatatactgtaatggagaacagagtggataacagatttttttttttttttaaaggaggatattgccgtagaagaggttgatggtagcttgaaccagggtggacacaaaggtgagaagcaactggattgtttgggcaggtgtgtgtgtgtgtgtgtgtgtgtgtgtgtgtgtgtgtgtgtgtgaagagacaggcgggtgtgtgtgtgtgtgtgtgtgtgtgtgtatgtgtgtgtgtttaagagacaggttctggctgtcattcagcctatactgcagtttctcaaatctcaagtgagcctcccgcgggcctcccacagcgttgaggttacagatatgagccaccctatctggcctcaggttgtatttttaactgcaaatggttttgcctaattcgtagggttgagaaagaaaaaagcaagtttaggaagatcacacttgtggagctcaattgtcttgtttaatcaggaggccaggttgtccacctagagtgaaaatagcttcagaggcttgaggactgaaaatagtaaaggtctggaagacagcagagaaaataaaaagagctgaacaaaggctattttaaggattaactgatgccctgcatgaagtttgaaaccatatgactttagtgatatcagtctaacgtgatacgtcattttcccttcacaacactcaactacccagctgcaggagttaagcatagattctagaatctacaggatttcatttgtaaatggcttgagttagatgacttttaaatctacgtgagttccaaaactttacttttaagaatcctagagtctgtactgctatcacacaatttattttaaattggtgcctagatatacataatgtaaacttaccattttaactatttcactagtttatttaaattcagcattctagccaggggcctccaataggtgtgctgggacattaaaaacctagccctgaaggtggcagcactgggcctgaggtgactagtctcaacttctgttgccactggatggaagcagcctcatcttttcattacaatatataacacaagtgttcattttctaagcatgctgaaattgaaaaagtttgggaagtactgtcctaagccacaacatatgagaaacccagtattatgaagagttcaaaataactgcttctctgttaaagatgttttttcagcagatctttggaacctcaaaatttattccatgtggttcttaaagctttagaacctatctatgaggatgcccgccatttccattgttaaagtggccatataaaatctcatttaaaaatctaagaattttgaatgtacccaaaggtttccatttacatagaaatgggatccaccagggaatgcccatttcattcattcatagaatattgatttggtggcagacactgggctagttcctggagataaaagggtgaacaaaccttttttattttttatttttttaattttaagacagggtctctcgctctgtcacctaggctggagtacagtggcacaatcatagttcactgcagccttgaactcctgggctcaagcaatcctcccacctcagcctccacagtaactagaactagaggcacgaaccactgtgtccagctattttggtttgatttttagaataggagacaagatttcactatgttgcccaagctcatcttgaactcctggcctcaagtgatcctcttgcctcagccacccaaagtctggcccaagacgtggttttttatctcaagaaatttacagtccagtggggagacagaattaattaaataactaaaacaataaaaactgtaagatggggaggttacatggtactgtaggaggatctagtagaagagactattgaaataagataaaaacatgattagtagatagctggggcaaagagtgggggtaggtttggtggagaactccaggcagagacaatagcacgcaatggcctaggagacatcaaaagtctagtgagaccagaggacagaaaatgtctggaaataaagccaaaggggtagcagaggcaattcaaaggggcttccttcacagagtaactggaagccactgaaagggtttaagcagcatagtgacattaacagatttacttttcaagatcacagtagctgcagtatagagaagtggtctcaaagtagacacaatttaaggtggaggagggaagatgtatttttattctattttttatcctttaaaaatgcttttaaaatggattataatcatattagctaagaaatactaattatggctagcttttgggcacatagtatatatctgaatactaagcagtttacatatattcatttaatcttaataccctgtgaggttggtactattattatcctcaatttacaggtaggtaaaatgggacagcgagcttaagcagtcagtccaaagtcactcagtaaggaagtattagagcaggatttaaacccagatgtctgacttcagagcctgtaacttcattagatcatgtaccatttttcaacagtacatgtatgtaatttaaaattaaatatatatatggagaatagaagttcaaatttttttctgaacaccagtgaaaacaaagatttaggaggggtggttggtagcgtggatgtggaaaggagcctagcagtagactaggtaagaaataacagtatcttggattatggaggtagtgatggagagaaggggatggatttacatgtttagtaagtaaaattggactgcgtgatggcttggatatggaagttagggatgaataaagtgtcaaggatgactctttggtttctgacttgcataaatggattagagagtgagacacaggcagaggccataggaacaggttgggtcattctgctcagtttttctttggaccacagtagagaccacagcacactgctctttcaatactctgttaaatgacaaacttattacaggttatttctgtcataaacataaaagcttcactctgtcaattatgtttcctatcttgcgttaaaaattacatagtcaaaatttcatccattttcttttaaaaatgtggagttaagtcttataaaatggggaagtgaatgatagttgctgtaacaggctaatagaaggtttagcacccctcttctgtatactaactttttaagttatatttattcatcccttaagatgtgggacaggtggaaaaattacctttccactttgtatttatgatttctaagtactaaacttttaaagcctgttaatattatcccttcccaggtcttagaataattacacaaaagtactggactggtttaaaagatatttgattctagtctattttgttcatttgtagaatttctagtggtctaaaaacgattcttttacaaatcaggagaaataggaatacctactatcggtttgaatctcaaacgaacagccacaagaaaaatggactttttaaaaaaaattatctaacagcatgttgtcccaataaataatgctgaaggagattccttctcgtttcaaatttgccagaaacttcccgtttaacctcagcaaaatacagatcgttttgatctatggcgttaccgcacaaccctgtcaggtcacatcactaaactgcagataacagcgacaaggccgaaaactatgttagacggatccgcgtccataccccccatcagttaattttaactcttcattcggtacaggtcactctacacatgcttccctgcaaaatgcttaagctagacacagtgtacagataactttcacagaaccgcaagggcttgatgctcccccaacagaacggcttgagctttccccagcgcaattcagaaatgctgtggcggtcgccagactcttcgggtagctcccggcagctccgaggtagcgctcccctccccaaccatcgccctccgggatgggccgcaccgaagagcccgctcctcagctagggcacgaagtgcgccgccgcgatgggcagctggaggaaggggcgtgacgcaagtggaactcccgcgtgacgtcgcgcgggctcccgggcggggcgggtccggccgcctccgagcccggccggcagcccccggccttaaagcgcgggctgtccggaggggtcggctttcccaccgaggatttggcactctggtgagggaaaagggcgaaagagaaaagcgagcagccgtcctttcacagcctcagaaagtgctcgcttcccttcgggggctttcgcgaatcccgaggcaatctcggaggcggtgagtaaaagcaatctctttaccccacccggagctctgggtcggagcgactgcttctggtctggagctgcgtgcttggcgaagggctcccggggtaggggtggctcccggctctggggttgtgtctgatgaaataggccgggcccgggctacactcggtggtggtggaccggcgggaggacgagcgctacctcagtactacttctgggtctcccgcgcgggctgaggaagcgcctttcgccgccaagcccgccccgcgcatgcgccgactgcggctcgcgcgcgcgcttcggaggttttttggccagacccgcacgcggaaccggcgcgggcacctggggagaaatggatggagaagggacctggctggaaagcctttgccccgctgctctgctccgcccataagaggacccctgaaatgtcccgtgcagtttgttcaagtcccctgtgtgatgaaatgtgcctctcgccttacccgtgtgagaatacctgtggtgtggcagcgagtattttggtgagcacctgcagtgtagtggtttatactaaggaatacacacaaattacaggcctttgagcccagaatgcaacttgggaggtaagacgtgacgttctgagagattgaaaaatgtacattgtcgtcgtgcctcgaataacggttcattgcagagagagatgctaacaaaaagtgccgggcatgcgggtaggtggaaagggttttgcgagccagaatttgcaagttgaatgttttgtttttatgttttgtttttaaggcactgtacatcacttacttgaagatagatacgtaaaggatgcttattttacactctttaaacgaatatgttaatactttttcggtcattgaagtaattaaaccttcattttaaactgttgacttaatagaaatcgtttatgtcttctttttttttctttttgctgcagagaggtattttttctttattttattattattttttatactttaagttctagggtacatatgcacgacgtgcaggtttgttacatatgcatacatgtgccatgttggtgtgctgcacccattaactcgtcatttactttaggtatatctcctaatcctatccctccccccaccccacggcaggccccggtgtgtgacgttccccttcctgtgtccaggtgttctcattgttcagttcccacctatgattgagaacatgcgggctacagagaggtattttacagttattggtctcatgacttgatttccatccctgacatagccatgtcccagctgtgtgaccttggacatttactgccttacgcctcttcccccaactctaaaatgaaattatagtagctgtcttacagagtttttctgaaggttaggtagaatataaatattctataatatataattatatattaaataatatataaatacaaatattaatattaatattctatagtttctggtatgtgggaaacaaatggtgacttttattcacaattatatataggcccatttgtttatctgttagagttaaagatagaataaaaacctctttggtaacaaaactaatgcagtgcacctaattctacttttaaaaacttttttacagaaataaatgtacacaagagaaatactggaattatgaaccccattgtatacgcacccacccagcttcagaaattgttgaagttcagcccttgtttcatctcttcacccaacatccatttttgtttgtttttgctggattttttttttttcaagcaaatcgcagagtatatccctttacctgtaaatatctcggtaaatatccctttaacagataaggcctttctaaaaaaaaaacaaacaaaaccgcatcattatcatacccaagaaaattaataatttcctaatatctaaaatccagctcatatttagtttctggattattttttaaaagtctaatcacaatttttgcaaagcttgatagtttatttttgtagctcttgacggttcaccaagtggcttcacatatactcctgctcccttcagaattactctttcagcccctttgtcagagacctcaggaaatggttagcaggaaacaatcagtttgctttggctaaggagccagatgtgaggtttagtagacttgctgatcactattactttttaagttgtagctaattaatggtttcattttaagaacacatattaaaatatttactaatccattcaaacttcttaacctgttggtttcttcaaggactatgtaataaacttaatgattcacctttattctaagagaggcatgaagtaacattaccctaattgtcttatgactctaagatgtttctgtattcatagatctttgctgtgtttaaatcttactgacttctcttgtttttggaaagttatacagatcctcatctgtgttaatacatcagtcaactgtctcttttataaaatatatatagatatgtgtatatatgtggatgcttgttaagtcaagactaagaatatttttcagttttgggctcagtatgtttcaccaattcaaaagttaaaaaaaccaatttttttttttaattgagacagggtctctgtcgctcaggctggaatgcagtggcacgatctccgctcactgcaaattccgcctcccagtttcaggcaattctcctgcctcaacctcctgagtagctggggccacaggcacgcactaccacacctggcaaatttttgtatttttagtaaagatggggtttcaccatggtggccaggctgatctcaaactcctggcctcaagtgatctgcccacctcagcctcccaaagagctaggattacaggcaagagccatctcccccagccaaaacaatacattagtctatagtggtaaattaatactgaccatgaatgataaaaacccctcaatatctgaatcctttctgtttaatataattgagataatttcttcctctaagagaaataagaaaatttgcctgaaaatttacctcatatagccaaataactgaaatcagaacttttctcaccattatcatctttccttattctttccttcccctcccaaattctaaaaatgattgattataggtaaataaggaaatggtaaatgaggatatctgggcttgtgtttcatcctgatttcaaagtacataaagataaatgcaaagttcatttatgttgcaatctgtcatttcaggtatttgacctgtccaaagacgacttgatacctctataatgtaacagaaaaggtcagaaaatattaagcaagtagaagtgtggagcatattaagcaagatgaacatctcgggaagcagctgtggaagccctaactctgcagatacatctagtgactttaaggacctttggacaaaactaaaagaatgtcatgatagagaagtacaaggtaaaatcttttcttaaatacttacagcagtattttgttgagactgtagtggctttgtatacctttgtatgacagtcctgtttattatttctatttcagcttttaggttccgggggtacatgtgcagatttggtacatggatagattgcatgttgctggggtttggtgtgcaaatgatttcatcacccaggtagtgagcatggtaccccataggtagtttttcaatccccaccctcttcccacccccctgaccctccaccctcatgtaggtcccagtacctgttgttcccctctttgtgtccatgtgtactaaatgtgtagctcccacttataaatgagaacatgcagtatttctgttgtctgctcagggtaatggcttcatctgcatccatgttgctgcaaagaaaataattttgttcttttttatggcttcattgtattccatgatgtatatatacttttttttaattcagtccactgttgaattttgtacatttaatggccatctttaaattcaaagatatcttttttttttttttattttttttgagacagggtctcactgtgtcaccaggctggggtgtagtggtgtgatcacagctcactgcagcttcaacctcccattctcaagtgagcctccctcctgtagttgggaccataggcacacgctgccatgcctggctaattttttattttttgtagagtcagggtctcactatgttgcccaggctggtcttgaactcctggcctcaagtgatccttctgtctctgcctcccaaagtggtgggattacagacgtgagccactgcgcctggcccaaagatctcattatttatttatttatttatatattcatgtatttatttatttactaattaattttcagagaggttctcactccgttgcccaggctggagtgcagtggtatggtcacagctcactgcagctttaacctcccaggctcaggtgttcctcccaccttagcctcctgggtacctgggactacaggtgtgcaccaccacgcccagctaattttatgtattttttgtagagacagagttttgcctttttgcccaggctggtcttgaacttctgggctcaagcagtccactggcctcagcctcccaaagtgctaggattacaggtgtccgctgctgtgcccagctgatctttttttctttttctttttgagacagggtcttgctttgtcacccatgctggagtgcagtggtgcaaacatggctcactatagtgtcaaactctcgggcccaagtgattgtcccacctcatcctcccaagtagttgggactacaggcgcacgcaccatgcccagctagtttgtttttgtttttgttttttttaaacttatccttcaccttagaacacctagctagtttttgtattttttgtggagtcagggtttcgctatgttgcccaggctggtctcaaactcctgagttcaggtgatctcccgccttggcctcccaaacagctaggattacaggcgtgagctgcgcccagccagatctcatttttagaggacatttacaattgtagtttttgtgattcatttttatggtcaaattggtgctttttaaccacagaacatagtttgtatacaacttgctgttatttacttgtggtaatatgtatgagatagtggaaaacgtatacaatttgttgactgaagacctgcatttgaattctgatttcatttacccacttgctctgtgatcttagcctaattacctaacctctaaatttaattttcttctataaaattctttgcaggatatagacataaaaatactacataaagtcatttgacaaacccgtagcactgaaatacaaaagtgaatggccacttaccttcagacagcctgcagtcttagtagagtcgtgtaaacagataattacagtacagtgaaataacagttaaaaggtttttatgacgtgcaaggagttttagaggattaagcaattgtggttgagatgagtaaatattatttgtgttaaaagatacaccatatgaagctaagctcaaggttttaatattaaattttaatatactttaattctgtaactttccctatgtccctatgtatgagaaatgcttcatattacatttgtttcttgattacctattataagtttaatattgcagtgctttatagctgtatcattacactggagtactattaaaacataatcaacctgaatctaaagtgtagtatgtgagtctgtattagaactttcttatggtaggctgggcacggtggctcacgcctgtaatcccagtgctttgggaggccaaggtgggcggatcacctgaggtcaggagttcgagaccagcctgaccaacatagagaaaccctgtctctactaaaaatacaaaattagccgggtgtggtggtgcgcacctgtaatccccgctactcaggaaggctgaggcaggagaatcgcttgaacccaggagaatcgtttgaacccaggaggcggaggttgcagtgagctgagatcacgctattgcactccaccctgggcaacaagagcgaaactccgtctcaaaaaaaaaaagaactttcccatggtaagtttagtttcttgcaaaacttctggtgacacccttattaattaatgagttttgaaatatgaacaaccccaaaagtattctttcaagccccagtgttcatggagacacaaagaaatgttcaagaaatgttttttgggcacttactatgtgccagaccttgtgaataagaataaatcctatatagtgctagctttaagggaatttctagtctagaattttaatgcagtatactatgttattatctgaaaacatgaaggaagaactgagggtgtgtgtggttgcatggggaagtgggtttgtgcatggtttatgtcagaccaggcttgataattaagtctaattagccaggcaaggaagatggtggaaggggagggaattttctgagtagagagaatagcacatgcaaaagtttgcagataagagcttgattttattcaaggaactctggatagttaggtttagttctaagaggaaatggaatgggagattggagttttgggggaggtggataggatatgatgctagaaatgtacatagatccaaattatgtaaaatggtatgtgctatgctgaagagattgtcatcttgccttgactttaggacagatttctctatttctgcaaaaaatgttgggattttgggatttgggattttgataggtaatgcattgaatctgtagattgctttatatagtattgacatcttaacaatattgttttgtagtccatgaacacgggatacctttctattagtgtcttctatatttcttttttttttttttttttgagacagagtcttgctctgtagcccaggctggagtgcagtggcgcgatctcggctcactgcaagctccacctcctggattcatgccattctcctgcctcagcctcctgactagctgggactacaagcacccgccaccacgcccggctaattttttgtatttttagtagagacggggtttcactgtgttagccaggatggtgtcgatctcccgacctcgtgatccgcccgcctcagcctcccaaagtgctgggattacaggcgtgagccactgcgcccggtctatatttctttttaagattttttaatttttaattactaatttttagagatgaggtcttgcctcattgcccaggcttgagtgcagtggcacaatcatggttcgccgtagcctcaaattccagggtgcaggcaatccttccgcttccaccttcagagtagctaggactacaggcatgcaccaccgaacctggctaatttatttttttatagagacagggatctcattttgttgcccaggctagtctcaactcctgggctcaagcagtcctctgacctcattggcctccaaaagtgctaggattacaggtgtgagccaccacacctggtcattctataatttctttcagcaacattttctgattgtcattgtacaagttttttgtctccttggtgaaatgtattcttaagtattttattcttttgatgctactgtaaatagaattgtttttttaatttgcttttcagattgttcattgttagtgtatagaaatacaactggttttagtgagttgattttatattctgcaactttcttgaaactcttgatttctatttttgttttttatgttttgaaacagagtctcactctgtcacccaggctggagtgcagtggcatgatcgcagctcactgcaacctctgcctcccaggttgaagcagttctcctggctcagccccgcaagtagctgggactacaggcacgcaccaccactcctggctaatttttgtatttttagtagagatgaggtttcaccatgttggccaggctggtcttgaattgctgacctcaagcaagccgcccatctcggcctcccaaagtgctaggattacaggcaggagccactgtgcctggctatttataagctattaatttaatagaaataaaatatttgacagatttcttcttcctattctttggtgttacaggatcttcatgaaatccctattttacagtgaggaagcatcaagaaacaaatggtatactctttaataggaacaatatgccatatttatcaaattatagaatatataaagcttgcaaatattatgtagtagataattcctttaaagtgtactcctcatggttatgttctaatcacattcccacaaaagtttctatactctgaataactttaagggaggaatacagtaattgttggtgtatatgataaggtccatgtgttttatgaatattaggtattggatatatgagctcataagagaagataatctttggtacgttatattgatcatgccactttcccaatttcaaataacttatggattcttaaaggtattaaatgaataagtactattttttaagtagatatgtcattttaaaacattttggtttgggccatgccttcgtcaatatgttccacatagttccatataaaattagagtctctatatgataacatcaaagacatgcctgaagggaacttaatttttttaaggaggtggggaatccatttgtagaaaccagtgtaagaagctgtttgaaagacatcaaacatggacttgtctggactttgcaggttttaaggtatatataggaatcaaaattgactcatgacttttaaagcttcatgtcagtaaaaaataaaagagaaatgttgggaatggtaatatttgagatatatagtttttacttagctacagaaatgtacccataggaacttgcttgaatctgaatgctctgctacacgtgtttagaattatttttgcctcttttgccaaaacataataaaatgatagcaaaatatgacagtatgtgcactgatcacaacaatataataaactgcatccatgtcttttaaaactaggcaagaatagacaaaatgctctaatttctgttggagactagcaatatgcaaaccagaccatttttgttgaaaaattctggagacatttatgaccgagtttttatatcctttaagataattttatcctttcatgattgtatcatttcatgatatgttccttttgtgacaaatgctgctagtatcagtgtcacagattgttactgatgatatacagtgtttatgctttaaattccgaactcacagaatttaatggaaacttcagaattctttaaatttcaaaagttttaaagcatatttatttgggtacaaaattttattgcctttaaaaatctttttcagtatcaagtttattatcaaaagcacaaataataaaatagaatttaaaatatttattttcagaataccactattttaataaatgatcttttgcctatgccagcgtctgctattaacatctagctaatatattttctgtgtctagtaaatatggtaatcagtttcaaagaaaactaggtaggttttgtgaggcaaagttgaaacaccttgaagaaatgggaaagtttgggggctctaataggacaggataaatatttcttgattcattttttaattgctccatttattttctatacatagaatcaaaaattctaaaaagagaacattatcttaagactgcacaaattaacagtgaaaggaattgtcccactcattattaagaatgctgtcaggctgggcacagtggcacacacttgggaggccaaggcaggaggattacttgagtccgggagtctgagaccagcctggacaacaaagcgagaccctgtctctacaaaaaacatttttttaattagctaggcatggtggtgtgtgcctgtggtcccagctacttgagaggttgaggcaggaggatcgcttgggcctggtaagtcaaggctacagtgagccgtgattgcaccactgcaccccagcctgggtgacagaaatcctgtctcaaaaataataataatattattattattatcagtaactctcacaccttttattttttatttgcattcacatctgtaaataataaaatccacaaaaattaatttacccattttgagataattcaatcttaagcaaagtgagcacagcttaagtatggctttggaatttaaataatttgttaggcaattatagaaatgctagcagtagtagttttggttgaagtttaattacttcatttgtatataaagcccccactgtttgtcaagaaagtgatgttaggggtattatttataattcagaaccataaataacttgtttaaaatgacagtacatacattttatatatatatatggtttggtctgggtaaagaactaaaataagaacatagcagtgatttttgttaatgcataaggaattcttgcctcatttctgaactcttaaatttgctttgtgtattacaatatacaggcccttgattgtttcatttcctccaaaatttatgtatgagtgtgtgtaaggttaattgtagcacagtgcttggtcttgtgaacactgtttcctcaataggtatcttaggttgccagtgttacaatcccagatactttgttcaacagattacctgttcatacaggagctacattgttgtatagcctcattccttccgatgggtgtggagcaggattaaagcacactttataggggttctaattgtagattcctaattgacttggtgaatagcaaatgctaaaatttaaacacacacacatatacacatataaacctgtttcagggtgatctacgtgacagaacaaatgcctcacaggtgttgaatgcttaccagataaaagagtagttcttcccctgtttcccaaggattttcttttgaagtttatatggattttctgtctcattgtttcttttcttaaaatggtttgtggcaagaatccatttcatctttggctgcacttttcacttttaaaggcagaactgattgttagaagtcagccaaaattaaaaacaaaaaaaaaatctgtcaagtaaaatttcgcacatttttgagaagggaaaacatgtgcatggatgcaccacaggttttggttttttaaacaactcacttattgaaggatgtttgggttgtttctaatgtttggctaagactgctgtgaacattcaatacaggtttatctgtaacatttttttcaccatcttatttataacattttatttattcaaattatagagcatagaatcgaagataaaatgtgtcatatcagttggacattttctaaaggtgaaatttgagacataaggaaaaaatgtaacatccaaaaaattctccagggcctttatttttccacagtatatggatttcctggcaataaatcattactatggagggcaataagaagagatgacttcttctttagtgtctatgtgaccatggttgggaaatgtataggtttgtttttaaaatttgtatttgtctaaattatgttgtccaaaagattgtatcaagtttaacaaataaagaaaaattatgttcttaggaatgataaatatattaatgtttctatacacatatatgaaaaacttttctgatttataacttgatagaatctgtgaactaccaaaggcatatagtaaatattcttgggttcttcggaaatcagtcaactagtaattatttattggtaactaactgccaccaaataaaaattcttgagtagatctataattgggtaaattgtagaatagtaaaagcactgattgagaaattaaagagtaaatattgagggcttttttcccctttatgttaatcacattgcagaaaatggggagcatagagaaaatagagggcacagcaatattcaacagaaaaaattttctagttttttactattttaatatttgattaaataacttcattttattttattttgttttgttttattttattttattttattttttcagacggagtttcgctcttgttgcccacgctggagtgcaatggcgggatctcagctcaccgcagcctctgcctcccgggttcaagcgattctccccagcctcccgagtagctagggttacaagcatgtgccaccacacccggctaattttgtctttttattagagacggggtttctccacgttgatcgggctggtctcggaactcttgacctcgggtgatctgcccaccttggcctcccaaggtgctggtattacaggcatgaatcaccgtgcccagccgattaaataacatttttaaatcaatattgggttttataatttttacaattttgctagttgttttggtttgacttatatttagttgctgatgatgtatgtattttcatatttgttcagtgacttttttcttttgttaattactgttcatgaaaattagaaatgtcaccctgttttgtccatatccttccttgcagtttcaatgcctgtcagtctgctttcttctcagtaattacctgagtccataggcagtggtcttctcttatgttttgtatcagacttaattaaaattaaaaattcatgtaatagatatcttgagataaaacattcatgccttttgttaggtacttttccataaggaattttgctactagtccaggacttcctaccacagtctagtttaatcccagaagatttgtgcctacataaacaccattgctgttagcaaatacacaggctatgtcagaacatagaccttcatttacagtgaacttctaattatatgcttgccctgctattagaaaagtaataacttactttagatggggaaaatgttattccatttgactgtcatatgatagactaaaagcaatacattgcagatatgcttttgtgactgcagagtacacgtaaggggcatatactgtaaactaatgagacctggtttattatttagaggccagactgatgtgacttaatagtggagcatttgactcataaaggaactgttgtagaagtaataccttttctttttacttttcaggtttacaagtaaaagtaaccaagctaaaacaggaacgaatcttgtaagtatcagtatgtaatactcatgtgttatttatagagtagttgatactgatgtccaatttgacattcatagagtagttgatactgatgtccaatttgaccttaatgtcttatttataaaaaaaattagccctacttagtatgggccttggtagtcagcagcagttttttttttcaaattctaaagtaaaaagaataattttgcaattttaagtgtagccttaattatgtatgtttatattgtaatacaacttacatatgtaatcttttcccataaagtattaaaatgacaattgatctgtagtctcattttgatttgtcagcggagttctttgttgagccataattaacacatggaattcaacatgctacaagacgaggagcagaataattctgggatttctaaactcatatgaatggaaactaaatgggtattttaagactccttttaggtagtttgaaattacttgaagattctctgaattgttttgcttataaagttctaaatcagatctgattttttaagttcgggaacatattttactcatgattctctagagcttccacattcaggaatctgaaacagatggcagagtagctttgtaacacttactaagaaaattctctttagctgctgagaaatttagaaattctggaatatagactattcaccttcagataaactcttgttttcttttaaaattattttaattaagaaatttaaagaattgtaaagacaaaaaaaattttccagttgtgcagcactgttttcatgcttttgattccttatcacaaagtttctttgtagagggtataactcgaacataatgttttgtccattttattcatagtagttcctatccctccctatagatccccccaccccagcccccatatatgacatttgatttaaaagtaatgaaaaaattgttgaatgtgctgcataggtatgtaaaagagacaggaaggtttgttatctattttattacagttacattttcaaatacaagatttacccagcttcttatgccagttgtatttaaaatgttcagttaccttagaaagacagaaggccaccaattaggaaaatgatactgagtttttagtaaaatgctgctaatggcattgagcttgctttagaaatgaagttagtgattggtgtagtaataactcttcctttggatgaggtccagggtagacctgtctttaatatattagacacttccctgtttttgaaattgcatgactctttttgcactgtctggaattcatcaatttgcttttttaaagaccttgttaaattatttctgcaattagtaaatgctctttatgttaccactttcttgacctgaatattttattaagtaattgaagttagttttaacttcaacttaggttattcatctacataatagtttagctttaagacaaatactgtcatgctctgcgttattctaaatagaacagtaatggaatatatgaatatgggaaaatcagataactcactactattacagagttctgttcatcatttaagaaaaaaccctttgctattaacttttcactccttaagagtgaaaatgtatatgtgtgtaaatcttcaatgtgtgtgtaaatcttcaatttaatatttactgtattttatgatacagattatttaaggcaaatgtgtgtaaattttcaatgtaatatttactgtattttatgatacagattaagttaaatattaaatttgaatacatgttggcagtctgttttaggacatgattaatcacacctccaggcttagacaagttatctggttgtatttgctgaataggatcagtgaaaacctggtgttccttctgaattaaatatattttctagaagtagtaggaaatattttatttatttatttatttatttatttttgttaaatgagaaatggccaggttaacaagcttcaatgatatattactttctgttattttcaagttctcagatgtccctacatgctaccataactatatttgttgtatagccagaaggtgttgctcttacgtgtattggtttttcaattaatataaacttttcaacaaatatttaagaaattccctctatatttgatacctgacattttggcttagttgttttactcatctattttggtgccagtgacactatattctagccactttgacacaatcattttgacatctactttttatgacagactgatttgccactcttaattgatttgatattttagacccttcaagggactgggagaaggtgtttgaatcatagtattacattttcagcttcaagactatacagaaaatcctaatcaaatttctaatgggttttcttagaattaaaatatgtgaatactttatataataaggtgatttttaaaaataatgatagaggggtaaaatatgacaactttggaaggtaatcaggtttaagtagaagaagattctggttgtctttgttagttttttttctcactataaagtcataatggtaaacacttaacataaagcctactgtgtgccacactgttccgtatccaatacatacattaatacttatttctcagaccttttggagtagatattaatgtatctacacttggtgaggcacagagagtttaggttaattgtatcaggtcacacagctggtaaatgaagagctggactcaaacccattttgcatctgggcgtagggttcccgttcgtccacttcactgtaagctctgacttaaaagcaagaccaggtaaaaattttaaacaacacagaaattagtaaaatagaaagtatgagttccccataattgaagagatgatgtgagtagagaaatactatttacattaataaatatatgcaaaataataaaataatgtacattttgatagctattttgacaaagttgagtcaatagtggcatgatgactttatggtatataagagctctgcagagaaaattctggtataatttgaactgtgatttacaagatattccaacctgaccttttcagttgttttgttttggtacaagaaatttgttatataaacacggtggagctcttagaattatcctgttaagagtatttttatctgaaaaacttatttattttttgacctttagagatgcacaaagactagaagaattcttcaccaaaaatcaacagctgagggaacagcagaaagtccttcatgaaaccattaaagttttagaagatcggtgagtctggcacttaggtcttgagtaagaagtgatttcctccataataagaagtacattgactttcatttgtaattagttttgggattgaaagtgatctttcccacagccttctctcacctttgaatgaatactttatgaaaacaaggatctattctttaagattttcattaattctgagatcacatcagtttaccctttaaatgatatctttatctggtgtttgatgtagtggaagctcaagggtagcaatgttctaattcatttaatgctttaattccagttttacttctaagtaggtggaaactgcttcacaattctgtttctgtcgtcttttcttgttcttgctgttctcttttcttctttgcagatttcctcactttgagggagtctagggatcttctttctgagtattcctgaaataatattatcacttacttccatacacagacttctttctttcccactcctatgaggttaacactgaggattagaaaaggcttccagcatttgctgttttcccttttctgaattgtaagtgctatttaggacctataaactacctacctgctatagtaaacaatattccagccaagcgtggtggctcacacctgtaatctcaatactttgggaggctaaggtgggaggatcgcctgaggccagacattcaagaccagcctggacaaacaaagcgagaccctgtctctacaaaaaattttaaaagctgagcatgatggcctgaacctgtagtttcagctactctagaggatcgcttgagtccaaagtgattgaggctgcagtgagctatgatcgcactgctgcgctccagcctgggtgacagagcaagaccgtgtctccaaaaaaaaaaaaaaaatacaaacccacgatatcccatactttctttatagtttttatttttccagggtaggcatagtggctcatgcctgtaacctcagttctttgggaagccaaggcaagaagatgattgcttgagtccagtagttcaaaaccagcgtcgcagtatagcaagaactcatctctacaaaaaattaaaaattagccaggcatgtgactggagtcctagctactcaggacactgagacgggaggattgcttgagtccaggagtttgagcaagctatgattgtgccattgcactccagcctgtgtaacagaacaagaccctgtctcttaaaaaaatttttttcttgatatttttgtatatgttacggaagggctgggtgatttgagtttgtctctatccttttagtggtgaaataatttaatattcttcatatgtgcaaactgaaattgagtactttctacaactaccaactcaatggatgcacatttgttggaataggcagtgtattgtggaataaagacctgtgcgctttagaatcacatatgtttttgaattccagcttcaccctgtgttcttaattcagattccacaacaaatatttgagtccttgctgtcttaggtgttgctctagggggctagggatgatacttttcctagtatgtcatggattaaatgagacagtgcaagtaacaatacataacagaagttgaataagacttacatatcttagttggtgaatataatttagcactcctgtctgtgcatatatttaattttcaaaggttgggagtgagccatacgacaaacaaatgagacaatttcagattataaatgctatgaagaaaataaaatcgaattatgtaattgagtaaccacaggatctgtgtagaaaaaaaaaccaaacgcagcttttcccactgtactcgtacaacatgcttcagacaccagatgtgaggaggagtttcccctaccaacaagcaaacaattaattctacagcagacactagctgggtatcctcttaattcaattcctacactggatatggcatcaggtcccacaggttgagggctttgtccccatgactgtgtccttccctcaattctgatgccaatttcaagccccaggttgtttacccatgctttggacagactctaaattggggttcccacaaccccctcctcgggttatatttactagagtgactcacgaaactcaggaaaacatttatatttatcagtttattacaaaaaatttgttaaaggttacaagtcaacagccaaatgaagagatacatggggtgaggtctagaaggatcctaaacacaggagcttctgtcaccatggagttggggtgctgtcttaactgagacttgattgacagaaaggaaccatccacttgaagaactagagacaaaaggaaatagaacagacaaatgtgaaagtctagggtagaaataagtttgaaatatttgaggaacagaaagtctactgtggttctagtttaatgagtaaaggggatgagtgataggagtgagattggaaatctagtggggcaacaactagatttcgtagggacataggcaaaaagtttggattttaattgtgatggaaaccacttaagcaggagaataacaaagggatataagtaggtagcaacagcctgtctatccaaatggaaatgtcaagtagatagatgtatatgtgaatctaggattcagtggatctcttaaggacatctttgaatagtataggaagaaagaagaggtcttagggctgaatcctttggcattcctgattaaggtttcatgaagaataaggacccagccagcaaaagattgagaaagagaaactattaaaatagaagaaaagccaggaacataggtcttgaccactaacaataccttctttgcagggctattttgaagtttaaatgagataatggaagcagcagtacataacagatatttaataagacatatactatctcctaattggaagatgattccaacttttagcactctaatctgtgttatataacacagccatgtctaggctgtctagctgagaagccaggaaactagaaagccatctctcccactcaccctttcccaggtcagcaatggaaaggaaatcattagttactcatctgtagtgtggtgaggcgcttccttctgttttctctggatatgtagtagaggatttcagggaacatatctctctcagcctttaactccagccattgaagagcttccttctcttatttcaccacgttttttctctcatttctaccattacaccactttctacaagcagtgaggttggagtgagtaatggcattaacgccaagagattaggaatgctttttgttccatcattcctatgtaaagaaaatttcaagattggtattaataacgaaatatgttagcctgagttctctgagaagcaaacatcaataagactttggacactgaagagatttattgggaaaaatacctgtaagaaatgaggcgtctgggagagctgtcagaccctcatgcctctaactctgtgaagaagagagggaagaggatactgtacttgtaagagagctttgacaaagctaacagggagtcctggagccatagttgccctgctttcctcatttatagcaggatctgactatgggatgcctggtgtattcacctatgtggaaacaggtgaaggatttcacagcacagaaggtggagccagggattttattctcctactgtggtaggagacagtaagatgactggccaacttatattgacttccagtactcttcctgtttagttgttccttagcaagttgttagagcccaaaattattacactcaaatttactggataacattttcattatgtttttcttgaaacattggcttaatacaattggctctccatttcatccccaagatagtattcttcatcctgccccttgaagacattgctttccagtgtcttcaaaacactcttcattttatggcttaaagtttgagcttcctgttctggtaacctttgcagtcttgtacttcctttttaagtagtttttcttctccaggccgtttcagagaagaaatcagtggatgagtgcctcatctccttcccattaaattactttcttttatgtagtctatatattttttttttatttttatttttccctgtattagtccattttcacgctgatttaaaggactgcctgagattgggtagtttataaagaaaggtggtttagttgactcacagttctgcagagctggggaggcctcaggaaacttacaatcatggcagaaagggaagcaaacacatcctttttcacatgatggcaggaagaagtgccaagcaaaagggggataagccccttataaaaccatcagatctcatgagaactcactcactatccacaagaacagaagcatgggggtaaccacccccatgattcaattacttcccacagttgggactgtgggaactacaattcaagt

SEQ ID NO: 5699 - DNA, 46057 bp, Homo sapiens
  LIR9 gene - 59510165 - 59516221 of chr19; NCBI Entrez Gene ID: 353514; Build 35; sequence includes 20,000 bases upstream of initiation codon and 20,000 bases downstream of termination codon of the gene
gtcactcttcatctgtagtttctccagagatacagtcactaggaatcaaaagagaagtgtttgatggaaaagcctgctgttgtgcgcatagactggcttcctgaacaacaacaaaaaagttttctaaaaagcatttatttgtggaatttgttgatgactgtggtataaacactcccttcatgggcaccttcaagattctcacatgactgcacctccccctacctgctatcacaccgcagtcggagctggtggtcttgggtgaaaggccctgaccctgtcctctctaagttcaaagactcagctcaggccctgcccccaggagagctctgggcagagatggagtgaagggggctctgagggaggctcagccacagaggaattcacccctcagaggagaagaagccaacaggagttctccctcttctccttcacctggagtccagaaggtgctaggtgggaagagggagggtcttggagaggccactgggcagatggagaggagagctttgagtggaggtggggactccaggatagctccaattcctcactccctttctgtgctccttcccaggaccctccaggggccccagccctccacccataggctccttctccatacctggtgagtcattgaggcctctgggctcagagggagggtggcctcccccagggcagtcctgagtctcccagatgatcccattcccctcaaggactcaagcacgagcttccctccagggagctgaggcagagccagaggaggggccacaggctccccggggctctgaggctgggctggtgaggggcgggggtcgaggcagagagagatgttggggcgcagcctggggaggagcagccgggctgacgtggggagcagggcagccccagccctcacctccccatcctgacccagcaggccctgaggaccagcccctcacccccacaacgtcaggcccccacagtgctaagtgaggggctttgagtgggaggtgggcggggtccaggggaggaagggctgagttctgtcatcggtttgaggctcctctggaggtggtgatgtggacaggcccctcctctgcctgggcctcagtttctccaagtgtaaaggagagaggcctgcgggtgggaaagttcctttcagctctgactcccagctgtgacctcctgggagaggaggcctcccagggaaactcccagacccgattccacaggggcctgtcctgtcccacctgcagcagagacggtgacctggggcaggggaggggagcagaggctcatgtgtccagagagtctggggtcctcctgagctcccccacccagggaaaaccagagccaggcccagggaaaagcagtttcccttcctgtgggtccacagctgtgggtacctggacgggcagcagcaggctctgagtgaccacatccgtgtgtctgtctgtcctggagggccctgtggtctcctctcccacagctggagcccccagagcaggcatcacggtgttcgtgcttctctgcctcagtcagtgatggagggagaaggggctaccaggttctccacgagcctccctcttactccagcccctgggctctcaggttggggggcacagttgttctgggctgagggtgataaaacagagaggggttttggactaaactagagaaccaggagtgaaagagatcttgggacccagcctctggttccatttcagggcccttccccaaaccctccccatgggctgagacaggctctgtgatcacctgggagaggcctgtgaccctctggtgtcaggggaacctggaggcccaggagtaccgattggataaagagggaagcccagggccggtcgcggtggctcatgcctgtaatcccagcactttgagaggccaaggcaggcagatcatgaggtcaagagatcgagaccatcctggccaacatggtgaaaccccgtctctactaaaaatacaaaaattagctgggcgtggtggtgtgcacctgtagtcccagctacttgggaggctgaggtgggagaatcacttgaacccgggaggcggagcttgcagtgagctgagactgtgccactacactccagcctggtgacagagcaagactccaactaaaaaaaaaagagggggctgggcgtggtggctcatgcctgtaatcccagcactttgggaggctgagacgggcagatcatgaggtcaggagatcgagaccatcctggctaacatggtgaaaccctgtctctactaaaaatacaaaaaattaggtgggtgtggtggtgggcgcctgtagtcccagctactcgggaggctgtggcaggagaatggcgtgaacccaggaggcggagcttgcagtgagcccagatcacgccgctgcactgcagcctgggtgacagagcaagactccgtctcaaaaaaaaaaagaaaaaaaaaaaaaaaagagggaagctcagtgtcctgggacagacagagcccactgcagcctggagacaaggccgagttcccccatcatatccatgacaaatgaatatgtaggatgatattactgtcactatttcagccccagagctcactgactccctggagctggtggtgataggtgggaggacaccttggggtcccagccccaggctctgccctcaggaaaggggtctgctctcaggggtgtctctccctcacagcccagccctaagggataaggtgggaggcttgagcctcaaggatcacactacctccttctctcctaggattctacagaaaatctaccttctcagcccccctgagcctgttgcaactttaggagaggactctccagcgtggctcatggctgcaactggacagattcattctgaccgaggaaggagaactcagtctctcctgcaccctagactctcagcaacaccctagtggacagtcccaagctctgtttcctgtgggccccaagaccctcagccacagatggatgttcagatgtcatggcaataacaggaacacccttcaggtgtggtcggaactcaacgactccctgaagctcctgttctcaggtgaggaagtcagaacacccttcaggtgtggtcggacctcagcaactccctgaagctcctgttctcaggtgaggaagtcccatctttaccccaaacattctttgaagcatcagacaggttgctgtggatcttgctcccaggcaagtcccaagcgtgagggtggaatgaggggaacgagggcttctggggccagagacacagagtataagtgatggtgagatctgcagagccaggaggacaagggatgtatttgaggggagtcagcccccaaagtcctgacttgtctttccctctaggtgtgtctaggactccctgcacgggaccaaacaggggcccctcctaatctctggagagagtctgaccttccagtgttgctctgatgttggccaccaaggacttttcctgtctgaggagaggcgacatgaccaccctggcaccatggctggcagccccaggctgggctccgtcaggctgacgtttccttggagtggctcccatgggagccaggacagatgctgtgctaaacgcaacgtcttttcttttcttttcttgttttgttttgtttttgtttttttgagatggagtttcgctcttgttgcccaggctggagtgcgtggtacgatctcagctcactgcaaccttcacctcctgggttcaagtaattctcctgcctcagcctctcaagtacctgggattacaggcatacactaccatgcctggctaaatttttttttttttttttgtatttttagtagagactgggttttgccatgttggccagcctggtcttgaactcttgacctcaggtgatccacccacctcggcctcccaaagtgctgggattacaggcgtgagtcaccgcaccgagcccacaatgtcttttctgattgtttggtcccctgaatcccctggatatgctattgcaggtgaggggtccagcaggttcactcagggacccagattctgcacagggcctgctggggatctgcaggcggtgatgaccagcatgatgagtgtattagtctgttttcttgctgctgataaagacatccccaagactgggtgatttataaagaaaaagaggtttaatggactcacagttccatgtggctggggagacctcataagcatggtggaaggtgaaaggcacatggtggcagacaagaaagaaatgagagccaagtgaaaggggtttccccttataaaaccatcagatctcgtgagacttactaccaggagaacagtatgggggaaaccacccaccgcctccacgattcaattatctcccaccaggttcctcccacaacacgtgggaattatgggagctacaattcaagatgagatttgggtggggacacaatcaaaccatgtcaatggataaggttctttagagagggaaagagacagaggggcaaggtggatgggagggagaggaagagactcagaggaaacagtgaatgacagagagactgagggtcctagagagaagccctgggaaggtctctgctcagaacaaggtgggggcagcccctcacccatcctgcctctctctaggacagctgcctgagggatattccctgttggtgcagccgggctccatggtggcctcaggaaagaacatggtcctgctacatcagtgacacttttcttatttccaagaagggagcagcagatccctacctttgtgtctaatatcaaagtaccaagctcagcagtacaggctgaattctccatgaatgctgggaggacctacaggtgctatgtcttatggagtacctccccctacctgttttcacaccccagggacccccagggtttgtggtctcaggtaaggagatcctaccccatgagcactgaggctggaatgagacatgtgtgaacatatgagaaaatgtgtttagaacttcatgttcgtaacacagctttggatcacaaggtcaggagatcgagaccatcctggccaacatggtgaaaccccatctctactaaaatacaaaaaattagccgggcgtggtggtgcacgcctgtagtcccagctactcgggaggctgaggcaggggaatcgcttgaacccaggaggcggagattgcagtgagccgagatcgcaccagtgcactccagcttggtgacagagtgagactccatcaaaaaaaaaaagaaaaaagaaaaattcctaaattgtatatacttattgtgtaaagtatgtagttttgaaatatatatacttgtctgttgggcaaatcaatctaattaacatatacattactttccatatttctaatttttgtgtggtaagaacccttaaaatctacttttatagtgatttttaaggatataatacactgttatgtcttccgagatggtgaaaataccaaaatggtgtgtagagattcattctgcattcttgtatccaagaaagaacatgggaggtgatatggtttggctgtgtccccacccaaatctcatcttgaattgtagctcccataattcccacgtgctgtgggagccggtgggagataactgaatcatggaggcagtttctcccattctgttcttgtggtcgtgaataagtctcagaagagctgatgattttataaggggtttccccttttgcttggctctcatttcctctgtacctgccaccacgtgagatgttgctttcaccttccaccatgattgtgaggcctctgcagccatgtggaactgtgagtcaattaaatctctttttcttataaattacctggtctcgggtatgtctttatcagcagcctgaaaatggactaatacaggagttgaatatgaaagtgaaggaaatctcagatactgctaaaaagaaggcaggcagcagctcatgcagcaagacctggcagaaaaccatgagtgaacttccagtgcctgagagggaagttatgagaccacatgatacccattctcagtggggagccaggcaatccaggccactggggagctctttgaccgacctaagccctggatctgacttagggaacagcgggaggactgtgaaaaggaagggcccagggaagtgctccatgtgtgctcccagacctggatgctgatagaaagaggccattcctgatcctaacccttagtgggcagtgcaagaacttgacatcggcccggcgcggtggctcacgcctgtaatcccagcactttgggaggccgaggcaggcggatcacgaggtcaggagatcgagaccatcctgactaacacggtgaaaccccgtctctactaaaaatacaaaaaattagctgggcgtggtggctcatgcttgtaatcccagcactttgggaggccgaggcaggcggatcacgaggtcaggagttcaagaccatcctggctaacacggtgaaaccccgtctctactaaaaatacaaaaaattagccgggcacggtggtgggtgcctgtagtcccagctactcgggaggctgaggcaggagaatggcacgaacctgggaggcgaagcttgcagtgagctgagatcacgccactgcactccagcctgggcgacagagcgagactccgtctcaaaaaaaaaaaaaagaacttgacatcaaacatgggtgagggtcactacttcggagagtcttgggccagagattgacaatctgggctcaagtagaagacaggtccccatggacagaactgagaggcaattgtggcatgggctccagacaccaagcactggcgttggacacctctctttgacagaaccgcgtgggaaaagttgtagcctgagaggcatggattttacccaggaggcaagatctgtggcctggggtagttgagtggtctgacatcaaaccgcatgtgatttgacggtctgaaattgcttccagcattgggccacagggaggagctctgctgggttgggagcattagattaaagtgagtcccactgtcattttctaggcttggaacccaacgtgcccctctggggaactctgctgtaactttggcataatagtcattgccctactcagtgcttgagtgtctctccagggacctgagaaccacacatgtagcctctgtggggacggagcctgtgcctagcattgggcctgagtacaggcttgcctggaccagccacacttaccttcatttccctgcgttggaggcagagtactgatcaagaccactgagttttccacaacccaacccatcacttaggatacctgaatgcttccggttaacaaaggtcaagcataaagcccactgccagcgctacaactggctctcaccagcaattgccacctactggcctggaggtcaaaccatacagcacattacaacgtctcctgaaacaagtgacagtgattggggaagagacaagtttcacacaaactctgccaccaccattgcccacgccaccccagctacacctctcctttgcagaaccgcttgaggaaaggctaaacctttctgcaaaggagaggtgtctaattccagtgctcggggtctggagcccatgccacacttgcccctcagttctgtctgtggggacctgtcccctacttgagaccagattgccaaggaggaggccttaagttaacttgcctgctctgtcacctacctgagcctgggaaggttgaggctgcagtgatccaagatcgtgccactgcactccaccctgggtgacaaagtgagaccctgtctcaaaaaacaaaaacaaaaaaactgctctgaccttttcaaaagtatcaaggtcaagaacaaagataaacaaaggcaccacgcagtggagtaagagcctgtctattgcctattgctctcaagcgccatctactggattacagccacactacaacaccaaaaatcactttactaaattctaccgcctggaaaaccaagagcaagaattcagcaaagaccctgtacagagccttagtcccctgaaaacttccagaaataaagccaacagactatactcaatttatacccttgcaatgaaaggaatagcaaccctcccagatgagaaaaaaaatcagggaaataactcctattatctccaaaccagtccacgagctccccagaaattgttcttaatcagtatgaattgtctgaaatgacaaacgtagaatttggaatctggatggcaaggaaggtcattcaaatcaagagcaaagttgaaattcaatccaaggaagccaagcaatccagtaaaatgattaatgacatgaacgattaaattttaagaaacacccaaactgaacttctcgagctgaaaaattcatgacacgaatttcataatacgatgagaagcattaacagcagaatagaccaagctgaggaaaagaatttcaaagcttgaagacttgtttgaatcaaatcagtcaaatataaggaaaaaatatttttaaaagtgaacaaaatctctgagaaatatgatattatctaaagacaccaaatgtatgacttgtcagcattcctgaaaggggaagagagaataagcaacttggaaaatatatttgaggatatagtccatgaatattttcctaaactcgctagagagtttgacacacaaatccaagaaacatagagacgcccagccagataacggtctagatttgagggtatggtaaaaaagatgcttagaaaatgtcagaagtgagacacaatggctcatttgcttgtgtcttgcattctccaccttgcaattctgtactgatggctgtactatcagcaggatccactcgttattatattcactatcaaccttcagcctaagggttttggcagccattgatgtttattgcttgtatactcaacgcacaggttatccaagctttgcagggttaactattattatgcaaaaactctacagctattcttaggcaaaaacattactatagctattactatacttattattatgtagaaacattctacagaaaagaatgtttcctgtgtaacacttcagataaacaaaagagatcttgcttcttgccttcatttccacgtttttgatgtggagattttgttcttttcccattcctcatatttgaggggttttttgttttttaattttgtttttaacagtagtaaactgataggctttgaacatattcattagttttaatacactacctatattatttgattctataaatattccacattttgccattgggaacttttcatgatagactttatgttcaggtaacatgaatctgatggtatgtggtgatgtctttgctttcttgcatgataagaagttctgacttcatctcctgtattttctctccgaatgtggagtcagctatttctctaggatgaaatttagaatttttgaccatacatattttaagaattaaacatttttgagggtgtattcacttatgttttactatatatagtcaaaattatataataatattaactatatgtcactacataatatataatttgatttaaaagtatacatttattatataatatgataaataatatatgcattataaaatatatggtcaagtaattttgcttacattctagtacaaataattcttccttgtttagtaatgccctaatttgataggaactcaattctatttccttttttaaggtattatctttagatttataagttatatttaaaaatattttatagtatagacattcaggaatatgtttatatatgtatatatatatttttttaaacggagtcttgctcgtcgcccaggctagaatgctgtgggtggcaagccacccaggtgccgaggcaagagacagaggacacgagctgttccagtataataaaatataaaacaagaatagttataccagatatagatcttagttatgattatatatgaatatcattaatcatttgtttgtagcagttaccctttatcccaatattataataatcctccctctgtaatcataacctaggaaaagccaggccatacagagataggagctgaggggacacagtgagaagtgaccagaagacaagagtgcgaaccctctgtcatgcccggacagggccaccagagggctccttggtctagcggtgacgccagcgtctgggaagacgtccgttgccaagcggaccgtggtctagcggtagcgtaagtggcaaggaacaacacccgctacttagcagactggggaagggagtctccctttccctgggggagtttagagaagactctgctcctccacctcttgtggagggcctgacatcagtcaggctcgcccgcagttatccggaggcctaaccgtctccctgtgatgctgtgcttcggtggtcacgctcctagtccgccttcatgttccatcctgtacacctggctctgccttctagatagcagtagtaaattagtgaaagtactaatagtccctgatatgcagaaataatggcgtaagctgtctttctctctgtctcctctccctctctgcctcggctgccaggcagggaagggccccctgtccagtggacacgtgacccacgtgaccttacctatcattggaggtgactcacactctttaccctgccccttctgccttgtatccaataaataacagcgcagcccaacattcggggccactaccggtctccgcgcattggtggtagtggtcccccgggcgcagctgccttttcttttatctctttgtcttgtgtctttatttctacactctatcgtcaccacacacagggagagacccaccgaccctgtggggctggtccctacaaatgcagtggcacagtctcagctcactgcaatctccacctcccaggttcaagcaattctcctgtcagagcctcccgagtagctgggatgacaggagtgtgccaccatgcccagctaatctttttattttcagtagaggtggggtttcaccatgttggccaggctggtcttgaactcctgatcttgcgattcgcccacctcagcctcccaaaggtatgtttatatttctataccaaaacaagaaacaagacacaatgatgtcagtctagctttattctgtctcctctgcactgttttctctctctctctcaactacccacttttaaaggtattgattaatctttcattttaaaaaatagattacaaaatacacacacaatgacataacactataccatttttctctggttctgagtaaaataaagttaactgttgataacgtcctgaatctttctttttcttttctccctgccaccccaactacacaactacacgtcttggaaggtcagccttcaagataactcattcatctcacccacagctgcccaggactccactgtggggaggcccaggaatttattgagtctttctttgattgaaattaagtgggttcaagtcattgtagttttacaaatcataattttggaataaatagctttgtaattgtacaagtttgttcttaatgtttgtattcacctggaataatgagtttcgtgagaaaaaggcattttctgggtgtcaggcctctgagcccaagctaagccatcatatcccctgtgacctgcacgtacacatccagatggctggttcctgccttaactgatgacattccaccacaaaagaagtgaaaatggcttgttcctgccttaactgatgacattatcttgtgaaattccttctcctggctcatcctggctcaaaagctcctctacggagcaccttgtgacccccacacctgcccaccagagaacaacccctctttttcctttacctacccaaatcctataaaatggccccacccctatctcccttcgatgactctctttttggactcagcccacctgcacccaggtgattaaaagctttactgctcacacaaagcctgtttagtggtctcttcacacggaagcgcatgaaaccgggtacagtgaaaacactcaattgtatttttcagtctacagattcctctgatgaaaatagaatcaaactccaacatctcctctaaatggagatggtttctgttaacttaaattggagtattacctttctcattcagaccgctgctggaatccttggaaattctctactcctttacttttatagctttacttttgtccccacacaaatagtgagacccagagacctgattctcagccagctggtcttagccaacaacccggttcttttctctaaagggatccctcagacagtggcggcttttggattgaaacctttcctggatgaggctggatgtaaacttgtcttctacctacacagagtggccagaggggtttccctcagcaccacctgcctcttcagtggcttccaggccatgaagcttcaccccagtatctctgggaagatggaactctgaattagatccccaaagtttatagttttctgctgtttcctctgttggatcttgaatcttgttgtaaatatttatactgcaaagtatataactgacccaataaagagcaaaaacatgagtatggaaaaaatgtatagatactgctcctcaccctatccaggaagatcgctgtatgtaatagttgcagtcatttactgctgcacagatggtatatgtgtctcccgtatatgtgtctccctcatgatctgcaccagcagctccatggtcctcgtcctgcatagatacaagcagagagtccaacatgttcgcagccgcaacctctcccgcagaacatctcatgaaaccacaaccacacacaccatcctcatcctggtgagcatgtttgtctcctctcatgctctagctgatattttgtcattgtgcgtaacccagattcagaatccaagccaatggctgagaagtacctctttcctggcgtctgcaggattcccgacattcagcccctttgtgttcattgtcagtgacgcccgagtgtcacggttctactttgtgtgctagataaggaagagaaatgccccaggtatggtctctgggctataaattgcctccagaccattgcatcctctatttaatcacttcctccaccccggtgtttgaaggctcacacatcaggcctgtgaaggtacacccacacgctgccctggccattcagaatccccaaacctcccactctggggtatgcaagtgcacagcaaagactccacttgggagcaattatgcaacagcttgtattcaagtaatctcacatgaaataacattaaaatgaaattaagtataataaaacccaacatctggacagagtttatttttggaagaagtttaatcaaaggcagccataagcatgtaaataaattccaactcatttactcattgtaaattatttttatttgtaacatttatttgtaaaaattatttgtaaactcattgtaaattaaaatattaaatttacaatggacatgcaaaaaaagacttgtaaataaatgcattatgtagtaatactaatttctttattgggtctcaaaggaaacttttaacttaagacacttttattttaccaacaaataacaatatttctctcagaattattctttgtaacaccacaacggctgtaacccatccaacttcactcaaagaaagtgaagtaagtgctctaaagaaaaaaatatcctggccgggcacggtggctcacacctgtaatcccagcactttgggaggccaaagcaggtggatcacctgaggtgaggaattcgagaccagcctgaccaacagggtgaaatcctgtctctactaaaaatacaaaaattaactgggcgtggtggctcatgcctgtcatccagctacttgggagactgagacaggagaatcacttgaacatgggtagcagaggttgcagtgagctgaggtcaggctgttgcactccagcctgggtgacagagcgagactccatctcaaagtaaaagaaaagaaaaagatgagagaagctcataccttcagaactgaaacatagggaaagaggaagcagaaattaaagcaaatcgaaatttcattgcgtcatacggtcaggaaggcaacgaaacaaaagtttgcagaagggctaaaagtcactgtcaggaactgcattaacgtcattacatttagggttttttgtgggttttctttttagattttagcaaaaaattcatgaagcaactctaaaatacttatacttcaatatggtaaattaaatttatattaggacttcaaatataatcttttcctctctgttctgagtgtcatgcttgtgacattgatagaaggtggactctaggcaataaaagaaaaaattcaattttttactgataaattcaggtacaataaccgcctgttattttattgtggaccattttttctcttttttttttttttgagacgaagcttctctctgtcgcctaggctggaatgcagtggcaccatctcggctcactgcaaccttcacctcctgggttcaagtgattctcctgcctcagactccccagtagctgggattacaggtgcccaccatcatgcccggctaatttttatatttttaatagagatggggtttcaccatgttggccaggcttgtctcgaactcctgaccgcaggtgatctgtccgccttggcctcacaaagtgctaggattacaggcgtgagtcaccgcacctggcccattttctcttcatgataattcatgagtagctgggattacaggcacccaccaccatgcccagctaagtttttgtattttcagtagagacggtgtttcaccatgttggccaggctggtctcaaactcctgacctcaggtgatccacccgcttcggcctcccaaagttctgagattacaggcgtgagccacctcacacggctttattgttgttgttgtttttaatgttactctatttttttagattcaggcgctacacgcgcaggttccttacatggatgcattgcgttctggtggggtttaggtgtctagtgctcgcattacccatacggctcaccagatattacgggggaggcagaggggacactcccccatccccaaaagcctaaataacatcaaaaatcttccacatggggcccaggtgaaggtctctgcaggatcccccagcttgggtgggctcagctgtcacccaggggtccggtgcggggactggtaacccatgggcctgtcggttggagcgggggtctcacctgcttgcccatcgctgagctccaccactatccaaggaaagatgaaggcgccaaaagcaaagcctttggttagtgtgacagctctgcagtattagcagctgtttactgttacagcctgtgtgaccgctcttggagccctgatcacagactgccccgccccgctgtctctccgactgtctcagcaacctctcgctgtctagcccagtgccacctctccgtgtctttcacccattgccacccctccgctgatcactgtcaccatctctgctgtctagccatctcgcctctctcctaattgtccctgcctctgcggaaagtctctctgcctctcactcgctgtctccgtcatcccttcctggtaactagatgatgcggggaaggggagctcccaaatcggggcatagcccagaagagttcttggctttgcctaagaaagaatttaggccggtcgcggtggtccacacctgtcatcccagcaccttggaaggctgaggcgggcagatcatttgaggtcaggagtctgagaccaacctggccaacacggtgaaaccccgtctctactaaagactacaaaaattagcagggtggggtggcgggtgcctgtaattccagctacttgggagctgacgcaagagaatcgcttgaactccggaggcagagattgcagcgagccgagatggcgccattgcacttcaacctgggtgacagactaaaactctatctcaaaaacaaaaaaaaaaggaatttaagggtgagctggtgttacacaaccccttaagggttacggcaacctctagtcaagtggccgagcacagcagcagcagaggtactgctcctagggtggcagggctgccccacaggcggtgtgcccagaatagcagctcagaaacacacctgcagccactcttgtacctgcttttaattatatgcaaattaaaggtcaggtatgcagaaattcctagaaaaagggcggtaacttccggtcagtgggtctttgccgtggaaaagggcggtaccttccgggggttgccatggcaacggtaaaccgggatgccacactggtgggcgtgtcttaagaagagctgcttccaccctctgccctgttttagctagttctcaatctggcgtggtgtctgagtccccgcctccaaagtcccacatcctacctcagaacttctgagaaagccttttccccttccgccctggcctttcccatccgaataagaaggagctgcctggaagtgacccccaaagccctttcatttctgaccttctggggcatctgggttgcggctcatcctagacctgctgccgtcccccagccctcccttggcctggtcagctcctaccaataactgtgtgttgcaagggttagaaagccaggagaggcagctgcaggtacatgtaattgtaattgtatccatcaatgttggggtctgagattcgtgagatgaagccacagtattaggagaaagcaaagatttgtaaaaaccccactgtttagaatctcccctctctcacacatcacacactgtttcagattttctactaaaagcaacacccagcacagctgtgcatgactcccaggcccctaccctgtcctgcaggatatgtgatgagcagaggaaggagagcaggctggatcaggaggatttggggtccagccagactcagacatggggaagacgctggggctgatggaggaggaagagaggcaagcaagttggagagaggacagatggacgctcccttgggagctcttatttctcatttccaagagcccctgaggatgaagcccctcacccacacctgcggggtccctgggtcctcttatgacaggagaggaggctgctcgggcctcggtgggatctgactgggatgaggctggagtccgccccagacctgctcctttagagagaagcaccccacttgtgggtgcacctcacaccgcccctcctgtgctcacctgaaggcctctgtgctcagggaacccctgagagtaaggaggggccacgcacctgctccctggatgagttagggagttattcacagcgcggcttgtgtgtcattcatttctaccctgccttttctgtgcacacttgtctattgttactctctgttcttctgaaacatttaaagcaatacatgaatatataaacttatcattttaatttgggacatgatttcatttatatatttgctttagaaaatagtttcttatttatgttaagttttcctatcctaaacttttaaaattgaggtttattgatgaacttaagaagtgtcttgaaattttatttataagaattttatatatttatttcaatttaaacaattattcaatcacttgaataatctgtaaatgaggtctttgattccttataaataaaagctaggtatacatgatacagtaattggtttgagttcatttactttattttataccaacttactacagaatttcttaattccaattattttcaattgatcccctctaatttactaataaaatgtacataactcacacaaaagttgaaatttcactttatttctaaattgcattccaattgctgtctcccaggctggagtgcagtggcgtgatctcggctcactgcaagctccacctcccaggttcacgccattctcctgcctcagcctcccgagtagctgggactacaggtgcccgccaccacgcctggctaattttttgtgttttcagtagagacagggtttcaccatgttagccaggatggtctcgatctcctgaccttgtgatccacccgcctcagcctcccaaagtgctggaattacaggcgtgagccaccgcgccgggcggattattctctagttcttttagttgtgatgttaggttgttaatttgagatcacccatcaccacacctggctaattcttttgtatttttagcagagacggggtttcaccatgttggccaagctggtcttgaactcctgacctcgtaatccacctgcctcagcctcccaaagtgctgggattagaggcgtgagccactgcaactggcctatatgtctatttttataccagtgtcatgctcttttggttactatagccttgtaaactttgagtcagttaatgtgatgtctctagctttgctctttttgcttaggattgctatggctgtttgggctctttttttggctcaatataacttttaaggtttctttttctaagtctgtgaaaaatgaaggtatttttgtaaggactgcattaaatctgtagattgctttgggcaatgtggtcattttaatcatagtaattattctgatttatgagaatgggatgtttttccatctgtttgtgtcttctacaatttctttcatcactggtttgaagttttccttgtagaaatctttcacctccttggttaaatatattcccaggtgttttatttttgtgcacccactgtccatgggattgcctccttgacttggttctcagcttcgtcattattggagtacagaaatgctactgatttctgtactttgattctatatcctgaaactttactgcatttctttatcaaatctaagagtgttttggctgagtctttagggtttttgaggtataagataatatcatcagcgaacagaaataatttcactttttttttttccaatttagatgtgttttatttctttgtcttgcctgattgctctggcaaggacctccagtactacgttgaagagtggtgacagtgcacatctttgtcatgctccagttcttagggggaatgctttctatttttccctgtttgcgatattggctgggatttcgtcacctatcgcctttagtattttgaggtatgtccctctgtaccttgtttgttgggaatttttatcatgaagggatgcaggattttatcaaatgctttttctgcacctctgtgacataatcatagagactgaaaccagaatcctctcatgtcccaacccctcatgtcttaatctagtctagacattaaccgtgattgagcctctcccatgacccaagcacggctgacccccacatccgctgtgatgagtgaggttcatgacaacaggctccacacagggaaactgaggctcagagatgagacattactgcccaagatcacacaagccgtagataataatcgggaattacatagaaatcaactccccaccagccgggcgcagtggctcacgcctgtaatcccagcactttgggaggccgaggtaggcggatcatgaggtcaggagatcgagaccatcctggctaacatggtgaaaccctgtctctaataaaaatacaaaaaaattagccgggcgtggtggcggacgcctgtagtcccagctactcgggaggctgaggcaggagaatggtatgaacccgggaggtggagcttgcagtgagccgagatagcgccattgcactccagcctgggcgacagagcgagactcggtctcaaaaaaaaaaaaaaggaaagaaagaaagaaagaaagaaagaaatcaactccccactcagcaaaccagagcccaaacctaagtaatgtacccacaaaaattaaaaaataaatagatacataagaatgaaaattttaaaacaaagcctaagtaattactccaaaaatgttgaacatggattgaggtatagagggaagcccaaagaaacagaaggcacagtggaggcagaaaagattcagaggtttgttactggaggtggggtggaggtggacgctgttgcaaaaaaaaaaaaaaaaaaaaattaagggaagtacaagaaagagagtactattggttagaaagaaaacactccagggccactaaagggtcatgatttcctcccctatttccctgcatttctcctctgtgctcattgccacatgcagctcagcctgggctacacagccaggtgtcagatgtgtctctgctgatctgagtctgcctgtggcatggacctgcatcttccctgaagcatctccagggctgaaaaatcactgaccatggtaaggaccccgcaacgctgagctcatggacgggctgaaggagggagggagaccccatggggaggctctgagagggaggaggtcaccctcgcctgaaaggggctgactcgggaaggcaccgggtctatttgctgctgtgtcccggctctcagtgagataaagataaatcaggcagacagtggcccggggaagggagaccccacttctgtctgaaatgtctgcagagagcctggtgcctgtagtctcaactacttcacttcagccctggggaaatgagagccaggctcctggggagagcagttcccctttctgtgggctgagaatgagaaaatcctatgacaagaaggacccagcctccgagctgccacaccctgtgtgtctctctgtcctgccaggcaccatggtctcatccatctgcacagctgcagccagtgggaggagacgccgtgagccctgccctcatggttctgctctgcctcggtgagattggaagcctcagggaaggggcaccctagtctgggagggaccccaccccataacgaggcccttgtctatcaggaaactccagggttttaggaggttcccaggcaggggaggacctgctcaggcttcagaggcaaatctctcacagggaactctcttccagggctgagtctgggccccaggacccacgtgcaggcaggtgagtctgtccccagctgtcccaggtccctcctcctcaatggggacaaagggccacccatgggcagctggaggtgaagaccgcagttctgggtgattgatggggacgtctggagggtcctggggctgagagctgggatctgaggggtggggaggtcttggagcccagactctgatttccttccagggaacctctccaaagccaccctctgggctgagccaggctctgtgatcagccgggggaactctgtgaccatccggtgtcaggggaccctggaggcccaggaataccgtctggttaaagagggaagcccagaaccctgggacacacagaacccactggagcccaagaacaaggccagattctccatcccatccatgacagagcaccatgcagggagataccgctgttactactacagccctgcaggctggtcagagcccagcgaccccctggagctggtggtgacaggtgagaggacactctggggtcccagctccaggctctgccctcaggaagggggtcggctctcaggggtgtctccctttcacagcccagccctggggatgatgtgggaggtgggagccccatttaacacggtgcctccttctctcctaggattctacaacaaacccaccctctcagccctgcccagtcctgtggtgacctcaggagagaacgtgaccctccagtgtggctcacggctgagattcgacaggttcattctgactgaggaaggagaccacaagctctcctggaccttggactcacagctgacccccagtgggcagttccaggccctgttccctgtgggccctgtgacccccagccacaggtggatgctcagatgctatggctctcgcaggcatatcctgcaggtatggtcagaacccagtgacctcctggagattccggtctcaggtgaggaagccacagtcttctctagtacaattcagggaagccagacaggttgtggagagctttacaggcagggcagcccctgctaagaaagacaaaaaggggaaggagaacacagaaatcctagggacacaaattcagggtgaggaaaacaaagcaagggctgggcacagtggctcacacgtgtaatctcagcactttgggaggccgaggcaggtggatcacctgatgtcaggagttcaagaccagcctggccaacatggtgaaaccccatttctactaaaaatacaaaaattagctgggcgtggcggcacacacctgtaatcccagctacttgggaggctgaggcaggagaatcgctcgaacccgggaggcggaggttgcagtgagccgagactgtgtcattgcactccagcctgggtgacagagcgagactctgtctcaaaaaaaaaaaaaagaaaaagaaaaacagagcaagggagactccagaaggaggtttataggaggaaccagcccctgcagtcccggctcctttatccttccaggtgtgtctagaaagccctccctcctgaccccgcagggccctgttgtggtccctggagagaacctgaccctccagtatcactctgatgttggctatgacaggtttgctctctacaaggaggacagacgtgacctcctccactggccggcagccccaggctgggctctcccaggctgacttccccctgagcttggaagtgacccccaaagccccctcatttctgaccttgtggggcatctgagatgtggctcatcctagacctagaaaagcagctcccatcactcaccctaagacctggtctgctcttgccaatagctatgccttgcaagggttagaaagccaagaggggcagctgcaggtacatgtaatcatatccatcagtgctggggtctgaggttcgtgagacgaagccacaatattatgagaaagcaaagatgtgtaaaaaccccactgtttagaatctcctctctctcacatgtcacacgaagcgtttcagattttctactaaaaaccatgcagctttacaagactcccaggcccctaccctatcctgcgggatgagtgatgagtagaggaaggagaacagacctggtcagcaggatttggggtccaggcctgacttggaacatggggaagatgctggggctgatggaggaggaagagaggcaggcgagttggagagaggacagacggatgctcccttggcagctctcacttctcatttccaagagcccctgaggatggagcccctcacccacacctgcggggtccctgagcccactcaggacaggggaggaggctgctcaggcctcggtgggatctgacggtgatgaggctggagtccacgccagacctgctcctttagagagaagcgccccagctgtgggtaccactcacaccgcccctcctgtgctcacctggaggcctctgtgctcagggcacccctgagacaaaggaggggccgcgcacctgctccctggaggaagttaggaacttattcacagcacgtcttgtctgctgttcattgctgctctgcattttctgggcatacttgtttattttttctctcttcttctgaatcttttaaaacaatatttgaatatttaaatttgtctctttaagatatatggatttatgatttaaaaacaagtaattccactcccattgtcctgggggcataattcaatatttacatttgctgtataaaattagttgttaatagcaagtatttctattattaatatataaaattgaagtttattaatgaagttaataagtgttttcaagttccgttcataagaatgtgtacatttagtctaatttaaaaaattcttcaactactttaattattcttaagtgaagtatttgattcatgtatatttcttttgtttgtttgtttgtttttgtttttgagatggagtcttgctctgtcgcccagcctggagtgcagtggcgcgatctcggctcactgcaagctccacctcctgggttcacgccattgtcctgcctcagcctcccgagtagctgggactacaggcacccaccaccatgccgggctaatttttttgtatttttagtagagatggggtttcactgtgttagccaggatggtctcgatctcctgacctcgtgatccacccacctaggcctcccaaagtgctgggattacaggcgtgagccaccatgcccagcctgattcatttatatttctaagtaagatatacacatgagaaagcttttagtttgagtatattcatttaatttcattttagcttgctataacatttttccctttcaattatctttcaactgatctccccaaatttactgataaaatttatattaactataagaaaattgaaattttattttttatttctaaaccgcatatcaatttttgtcacttcaagtattaatatgcatgtaactgcatcttaaataaatatctaaagttttacatatatacatatttatgtatggttatataagttacatctgaatataagtgtaggtatatctgcatatattttttatacgtatatctacatgcttaatgtatttgacatggagggcttttacatgtttgttattggtcttctcacctagactcacactttataaaagcagaaatttttgtttgtttgtttgagatggagtctcttgccctgttgcccaagctggagtgcaatggcatgacctgggctcactgcaacctctgcctcccaggttcaagcgattctcctgtctcagcctcccaagtagctgggattacaggcaggtgccaccatgcccggctcatttttttatttttagtagagacggggtttcaccatgttggccaggctggtctcgaactcctaacctcgtgatctgcccgccttggcctcccaaagtgctgggattacaggcatgagccaccacgcctggccctaaaagcagaaattgttttatgagcctctgtaacaccatatatatatatatatatatatatatatatatatatatatatatacacacacacacacacacacacacacacacacatttatatacatacgtatatatatatgactgactatatgaatagttagctgactagagacttattgtatgatgaaacaccaggtgaggtggttgaggtggcgtcaaggggaggcagctgtttgtgattctgacattcaggagcccctgaggaccaacccgtcatccatggagcctgggtcctcagctggtggatccgtgaaactctcatctctgggggaattggcttatgtgctcctgtgtcccaggctgcacagagagcacaaagggctcagtgacttctgggggccactttccttgcagatcctgagctttcacggtgcaggaaagctctttcccaaatgactcaggagcaaagtttaaattcaaagaacaaaggaaagctgaaataattcagtgaggagactggagggaaccctgctccagcagagggagggtttatggaggaactccataaaagtcatgttgagaggcacagggaactaggagaatgcagagctcaggggagaggctgggctcagattgcttcaagaacttctccttccccttcccctgttttgattttcaggagcagctgataacctcagtccgtcacaaaacaagtctgactctgggactggtgagtgaggagatgctctcagttatggaactggcacagagggtcaggtcctgtcaagatgatatgggtgccctggggagacatccaggggtcctgggtgatactgatctgccctgacctctgtgacctctttgtccaccatccccagcctcacaccttcaggattacgcagtagagaatctcatccgcatgggcatggccggcttgatcctggtggtccttgggattctgatatttcaggattggcacagccagagaagcccccaagctgcagctggaaggtgaacagaagagagaacaatgcaccattgaatgctggagccttggaagcgaatctgatggtcctaggaggttcgggaagaccatctgaggcctatgccatctggactgtctgctggcaatttctttttttctttcttttcttttctttcttttttttttttttttttttttttttgagatggagtcttgctctgtcaccaggctggaatgcagtggcgcaatctgggctcactgcaacctccgcctctcgggttcaagtgattctcctgcctcagcctctggcaatttctagagggaggaatgggtgtttgagtgcagagacactggtctggggtgatccatggaggaccattaaaatgtgacacctttcctttctattaatgttgacttcccttggttggattcccttctcttcccagcccgagacatgaggctacatcccacatggcaggcagcgttgggtccacatctctgcacacctgcatgctctggtccttggcgtgtcacacagtccacttcaattctcattatcacactccctgtgtgctttactgagcctccatctcttcagttcagagttccacacctgaaccagtaactaaatccatgggagaagatcagatgccctccaggaaaagataaatccaaaatggcgtcctaacctcctgtctgtagccttcaagccccattcgctctttttttttttttgagacggagtctcgctttgtcacccaggctggagtgtagtggcactatgtcggctcactgcaacctccacctcccgagttcaagcaattcttcttcctcagcctcccaagtagctgggactacaggcgcatgccaccatgccaagctaatttttgtatttttagtagtgacagggtttcaccatgttggccaggatagtctcgatctcctgacctcgtgatctgcccgccacagcctcccaaagtgctgggattaaaggtgtgagccaccgcacctggcctgtagtgactgggtttcaccatgttggccaggatagtctcgatctcctgacctcgtgatctgcccacctcggcctcccaaagtgctgggattacaggggtgagccactgcgcctggcctagccccctgtcttgattatatgctcagggtcctgggaccagggtcatccctgggttgagggtccagggagagggtcctagagtagaggatgcgatgaggcagtggtccaaggagagcaacttagaaaaggagagtgagaggcctggagattacaaagacccacaccaagagtctaacaggagctgagagagaggaggccagtccctcagttcggggtccaggacatgtgggaaggggctgctttgtacacactgcaaccttcatatttcctagaaatgtacaagaaaccctccatttgtctgagccagggcccttagtgtcctcgggagagaacttgaccttgcagtgctactcagagatctggttgggtaccttctgtctgtccaaggaccggtcacttgtgcctccccaaaaccatcgattgaaagacatggccttactctctcaggccaagtttactccaagccctctgacttcagcccacagggggacctactagtgctgtggtccacatagttcctccttacccctattgtcacaccccagtgacccctaaagattttggtctcagtacaggagctccaagcaccacatccgttaagattctaaaccttagcatgcatccctgtgctaggagagccccggcctgggatagaaggaaggaaaaacagcagggaccagtcatagggcaatcccatctcagaaagggatgaagaaattcatgaaagtgggggtcattctcactctccatgccttaccctactcgggggtcacagaaggtgctgggtgagtggaatgagaagatttgaaaaggtagggggccaacctttgagcaaaagagatgaagctgaggaacagagcaagaggcaccacaaccccacctactccttctgtccctgccccaaacagtctgtgggatctgcagctcctcaccctcatggactcacttcatgttggctgagcaacaaggtcctcacagactacaggagtcacagtctccggcagctctgggctgagtttctcagcttattcttctgcccttgaagtctttacagaagaggttgtttccagagagcctgggaaggaaggtagagatgaagggagggagccttattttccaagcagcattgaggtattttgttcctgctgggtggtcagtatgaggtgaaatgtgtaaagaaaaagatgagcataaggataggaaaaatagacactgtggattactagagggtggaagagggttaaaaactacttattgggtattatgctcactagttgggggatgtgatccgtactccaaacctcagcatcaagcaatattcccatgtaagaaatttgtacttgtactccctgtgtctgaaataaaagttggaaggaaggaagagaaagaaagaaagaaagaaagaaagaagggaagaaggagagaaagaaagagaaagaaagaaagaaaagaagaggagagagagaaaagaaagaaaaagagagaaagagagaaaagaaagaaagaaagaaagaaagaaagaaagaaagaaagaaagaaagaaagaaagaaagaaagaaagaaagaaagaaagaaaacgaacaagaggtccagctgaagtggagagaggagtggaccctattccttgcccctgtccatggtgctgattcctagggattgcaaagatgccccaggcacctgtggaatcaggtccgcaatcagaagagcagactaaaaggtccctcttattctgtaggacaagtgggtgggtaagctcttattgtgaaggacaagtgggtgggtaattcacagaaagtcatagcttgaagtggagatggctcagccactctaagatagacgcctttagcaaactctatctaaatctgggatagtactcttccatccatcaaaggcagaatgccatccttgtttccaaaaggtatctcagttctaaacttctgtaccagtaacttcctgggaaagaacgtatcagaattcactttttctgtgactcctgtctactctggacatattttatctctaccattaactgttttcatcctgtggaggtaggaataaaagcaagatagcagttttctgattagatttccataatcatcaggttgtcaccctggcaggagaaaccacaacactgagtacttgaaagataacctctcctgggtttgaaacttcctgtacagtggcgtgatctctgctcactgcaacttccgcctcccaggctcaagcaattctcctgcctcagcctcttgagtagctgggattacaggcatgcaccaccatttccggctaattttgtatttttagtagagacagggtttcaccatgttggtcaggctggtcttgaactcctgacctcaagtgatccacccacctcgacctcccaaagtgctgggattacaggtgtgagccactgcacccggccacatatctccttattctagttattctcagagagtattctgtatatgtatatttctctccatccaatgatttgagattcatggttttattgtagataggtttttttctcattttatgtctttattgatttttacttaatttattgcacatctgtgaatacagatctatgttacttcacagcacttattaaatttcctcataatcaaataagtcttgtccacactaggaaactttctgcatatttgttgaatacttcaatcagctgatcctatattgaataatattatttttctggatcttcatataatgaccactttctcattttttcatttttccaaacctgtcacatcctcaaagacattttccatgacaaagtgggttaagtgattcttgcccacctgtattctctaatagtccttgtattaggttgacacacattcgagatctctaggtagcttaatttttttgtccatgtatccatctgcacatgttgttttctaatttatctccttaaaattttttgcttttttctcatgagtttctacattgaattaacaatgggagattttgttcactgtagtatttcttgctcctggaaaagaggcttggatgcggcccggcatggtggctcacacctgtaatcctagtactttgggaggccgaggtgggtggatcacctgaggtcaagagttcgagaccagcctgaccaacatagagaaacactgtctctactaaaaatacaaaattagccaggtgtcgttgtgcatgcctgtaatcccagctactcaggaggctgagggaggagaatcgcttgaattggaggcagaggttgcggtgagccgagattgcaccattgcactccagcctggacaacaagagcaaaactctgtctcaaaaaaaaaaaaaaggcttggattctaaaatcattctctcattcgtcgcaaaacaggacagatgagtggacccaatcattaaaagtgaggcagtgattattacttttaatagtagtagtattaagctacactggaccacagagataattagatgaggcagaacaatagaaaaggcagtgacagcctttagctctgttgtaccctggactctggtacaatctagagtcccacatacgcatctctgaattctgtattgacagatgaagagttactagaggtatttaccttaagtggttaagcacgggtttacctaatatgggaacaaattgaagatgagaaaggagcacagttaagtattcctgtatctttgaattccttttttctgtcactgagttgtggttgcaaatctaaactcttaatatcccccaaaccgagaggttggtggtgacctcaatgaggcccaagaacttgaacaaatttgaggaaggaaatcatacagtgctccatctgaggtggaagttgaggttagcaaggatggttacacaattctccatgagaagggaagagaggtccaggcgcggtggccccagcactttgggagtccaaggcaggtggatcatctgaggtcaggagttcgagaccagcttgaccaacaaggtgaaacactgtctctactaaaaatacaaaaattagccaggcatggtggcaggcccctgtagtcccaactactctggaggctgagacagaagaattgcttgaacctgggaggcagatgttgcagtgagctgagattgcaccactgcactccagcctgggcaatggagcaagactccatctcaaaaaaaaaaaaaaagagggaagagagttgttatgaaggagccaagacaggggagcaggagtagaatggccccagctgctctaatcctcccatgctcttattcgtaggagtccttgatcctctcaaccagcatccaccaagtatagtttcaaagtcaggagtaactacgacttccctttcaggagtgtgaatgtgtaaacacccatccaggctcccaatgtgggtgcagcctgtctagcccccagtgaatgccctgttctgtctactgaccatgccccttcagactatgcaatggagaatctcattccaatgaccatgctggcttgatcctggcggtctctaggggatgatctttcaggctcagcacagccagagaaggcccccaaaggccgccaacatggaaagtcaagatgattttggattgactcttcagtttggagaactttgaaaaatctgcatcagaaaagctgtgctggccctagaagaatctgggagagctggaggcacgtgctgtgtgaacgctgtgctgaaggattgaagatgactactatttcttttaggtgaaggatatgcaagaagaagttaacctaacagtgatgaggatgctaactttagaaggacttgtttgtgagcttgattcttggttggcatctaggaacttgcttctagcatgtcccctgtgttactaagagacaacgtgaggttgtgtgcctgcggcactgaattctgctgttatgtcttcactaggctgtttctgtaaacagtgtaattcatggcgaacacccggtttcctctggtttctctgtagctgctcattatgcctatgtggtccccacctaataacaatcttgaacattgagtctcaagcagatttgcctggggccaacactgcacatgtgttgctgcattttatgctggtggaatgaacaagttaagacacaggtttgcacaacttataaccaacatcatttttcttttattttctttcttatttccataggtttttggggaacgtggtgtttggttacttgcagaagttctttagtgatgatttctgagatttttgtgcacccatcaccctagtagtatacattaaacccgatttatagtcttttatccctcacctcctccctccctttcccccgagtccccaaagtccattgtagcattcttatgcctttgcatcctcatagcttagctcccacttaggaatgagaacataaaatatttggtttttcattcctgaatttcttcacttagaataatagtctccaatttcatccaggtcactatgaatgccattattttgttccctcttatggctgagtagtattccacagtgtatatatatttgtgtgtgtgcgtgtatacatatatatatgtatatatgtgtgtgtatatatgtatatatgcgtatatatgtgtgtatatgtatatatatgtgtatatgtatagatgtatatatgtgtgtgtgtatgtgtgtatatatatatgacaattgctttatccgcttgtataatcaacattatttttctcaaatgtattttggcaaataaaatattttccaaaaagtgaaaaaaaagttactcttatataacgatggcctaagataccacctactgatgaaagtgaggtggcaattttggattaacgggcatcacaggcaactacatagatcctctcagcaaacatacatgaggaaaaccaaaaccaaccagacagccagaaccggaattaaaaactagtccttcgactgggcgtggttgctcacgcctgtaatcctagcactttgggagggcgaggcgggcggattgcctgagctcaggagttcaagaccaacctgggcaacatggagaaaccccatctctactaaaatacaaaagaaattagccaggtgcggtggcatgcccctgtagtcccagctactcaggaagctgaggcaggagaattgcttgaacctgggagaaagaggttgcagtgagccaagatcgtgccactgcactccagcctgggtgacagagcaagactccatctcaaaaaaataaataaataaataactagtccttcattgaaagaccatggacaaatgtccaaaagaaacaagagcaaacagggaattatgaccacctcaaatggacaaagcatggagctaggaactgagcctaaaaagatggtgctgtgtgagctcttggatgaagaattcaaaatagcagttatgcaaaaacaacaacaacaaaaaaaactaggcaaactccatgataacaaataaaaccaatttagaaatgtatcagataaatttggcaaagaaattgaaatagtttcaagaatttaaacagaaatactaacgctgagaaacacattggctgaactgaaaattttattacaagctctcaaaagcagaatggatcaagcatctactcttccaaacatagcatcctctcagaagtgtgcctgataagaaagggtccaacatgggctgggcgcgttggctcacgcctgtaatcccagcactttgagagtccaaggcaggcggatcacctgaggtcgggagttcaagaccagccttaccaacgtggagaaaccccgtctctataaaaaatacaaaaattagctgggtgtggtggcatgcgcctgtaatcccaattacttgggaggctgaggcaggagaatcacttgaacccaggagatggtggttgcagtgagccaagattgtgccactgcactccagcctgggcaacagagtgagactctgtcaaaaaaaaaaaaaaggaaagaagaaagaaagaaagaaagaaagaaaggggggggagtgagggagggagggagagaagggagggagggagggaggaaggaaggaaggaaggaaggaaggaaggaaggaaggaaggaagaaggaaggaaggatttctactcatgactgtgataatctgtgtatttaagcaatattatatgtacaatttcttagtgctcagggtagatgaggattcttgggtgggagcgtcaattgtccaacaccctgattttctcaaatttacaaccctatgtcttactctgtcctgggaattaaccatcattgagctccttcgaagtcccagtcaccgccgacccccacgacccctctgatgagtggggtgtgtaacaacttgctccacacaaggaaactgaggctcagagaaggggttgtgaaggctcaaggtcacatgggcagcagataatgagcaatcattaagtaaaaatcagctccccatcccaacaggtgagttcccctcagggaaacaaaggacactgaagactcaggagtggatcacaagtctgtttccaaggagacgaaggtggatactgctgctaagagaaagggaaagtccatggagggcacgggttgatagagcaaactggcagtgttggatacaggtcgtgttctctacccatatttcctgtgtttctccattgcgctcattgccacagtgcagctcaacttgaactacacagcctgatgtcagatgcgtctctgctgacctgagtctgccctgcaccatggacctgcattttccctgaagcatctccacgacggatgagatgactggccatggtaaggaccccacaaccccgtgctgatagacaggatgaaggagtaaaggagaccccatgtggaggctctgagaggggaagagaagccctcagttaccctcacctggaagaggctcactcagggaggccctgggcccatttttctactacatcctagccctcaataagatgaggaaagatcctgcagccagtagccaaggatcagggggagcccatttctgtctgaaatgtcttcaggaaacctggtgctcactcccacctcagccctggggaaatgagagccaggcttctgcagttccccttcctgtggggctgctgatgggacaaccccatgacagggagaacccagcctttgagtgtgtctgtctgtcctcctggacaccatggtttcatccatctgtacagctggggccagtgggaggagatgccgtgactcccaccctcacaaccctactctgacttggtgagatttcaagaggagaaggggcaccctagtcttgaagggacttaactccagagccaagccctggtctatcaggaaatctcaggggtcaggatgctcccaggcaggggaggacctgctcaggcttcaggggcaaatctctcacagggaactctcttccagggctgagtctgagcttcaggacccatgtgcaggcaggtgagtctgtccccagcagtcccaggtcgctcctgctcactggggacaacgggccacccccagccacctggggatggagaacagcatctctgagctgactgatggggacatctgggcgggtcttgggactgacagctgggatttgaggaatgcattagtatcttgggacccaacctgtgatttcatttcaaggctcctcactaaacccaccacctggactgagccagactgtgtgatccctgggaggaggcctgtgaccacctggtgtcagggtaccctggagccccaagagcaccagctggataaagagggaagctcagtgtcacagaacattaaggaaaccactggggcctgggaacaagaccaggacccatatctcacacaagccagagcacaatgcagagaactgtcactgttattatcaaagtgccacaggccggtcagggcacagtgacccccctggtgctggtggtgacaggtgagaggacactcaaggcgcccagccgcaggctctgtcctcaggaagggggtcacttgcgccctgactttactgtcttttagggatgtcccataaaggggcagaagtgctgaagctctcaacctctgggtggcgtctgcatatcgtgcagaaccatctgcaaaccaggcttgagtcttcactttctctgtcaacggagcatagagaaatccccatgagattataggtgcaggctggaaggcagaaggttgtgtagcagggacaggaaccatgggcatttggccccctgctttgtgtaaattgctcacactttcagggcctgagtggacatgatcttattatacagcttgcatcggctaacacacacttcacatttcatggtaccttggtgacctgtgcccaagcatccagtctctcctaaggctcaataatggaaaaaaatataatattttcctttttttttttttttgagatggagtctcacccttcttgcacaggctagagtgcagtggcatgatctcggctcactgcaatctccgtctcctgggttcaagcgactctcctgcctcagcctcccaagtagctgggattacaggcaggtgccaccatgcccggctaatttttttatttttagtggagacagggtttcaccatgttggccgggctggtctcgaactcctgacctcaggtgatctgcccaccttggtctcccaaagtgctgggattacaggcatgagccactgtgcccggcaaaaaaaaatatatgtttttcaaaaggagactagctatctgtgaatgatgataggattttgctccacaatcctaagtgtctaagccccaattcacctataggaaggagcttgtcaaaacctccaaacagcatctcgatctgccactgacacttcaagcaccatctgttccactggatcatatggcccaggtggcagaagagcttgtgcaggacctggatctgttgcagagccttcccctattccacaccccactcaaaactttttttttttttttgagatggagtctcacagtgttgtccaggctggaatgcaatgggacaatctcggttcactgcaacctctgcctcccaggttcaagcagttctcctgcctcagcctcctgagtagctgggattacaggcgcccgctaccatgcctggctaattttttgtatttttagtagagacggagttttgccatgttggtcagactggtctcaaactcctgacctcatgatccgcccacctcggcctcccaaagtgctgggattacaggcatgagccactgcacccggcctccttttgagtcacttagtaaatgggctaatggagcacacccacatgagaaatatgttgctttcaaaatccaagaggtagggccaggcacggtggctcacgcctgtaatcctagcactttgggaggccgaggtgggcggatcatgcagtcaggagttcgagaccagcctgaccaacatggtgaaaccttgtctctactaaaaatacaaaaattagctgggcgtgagggcgggcacctgtaatcccagctactagagaggctgaggcaggagaatcgcttgaaatcggttgcagtgagcccagattgtgccactgcactccagcctgggcaaaaaaagcaaaattctgtctcaggaaaaaaaaaaaaaaaacccaagaggcttactaggtaccatggttcttttggttgtaggaagggccagatgcaacaacttaccttttgctttagaagttacatctcaacattttccatatcagtggactcagaaattgtgttgaggcggaaggctccaatatttttgtggaatttatttctcaccctctgtcatgcaaatgtgttactaataaatttggaataggtgctacttcttgctttcctggtccaaatagcataatttctttttttaactttattttatttttatttttgatatctaatttaatttaattttatgttctgggatacatgtgcaggacctgcaggtttgttacataagtaaacaaacgtgtgctgtggtggtttgttgcacccatcagcccatcacctaggtattaaacccggcacccattagttatttatcctgaggctcttcctcccttttccccccaacaggcccaagtgtgtgttgtttccattcctgtgtccatgtgttctcattgttcagctcccacttatgaatgagaacatgcagtgtttggtttttggttcctgtgtttgtttgctgaggataatggcttccagctccatccatgtccctgcaaaggacatgatctcattcctttttatggctgcatagtattccatggtgtatatgtaccacagtatctttatccagtctgtcattgatgggcattccaaccagcataattttatcaatgtaatgattcagtctaacattttatgaaaggagatgataatgatgattatggtgagaactaaactatgggatagaactaaacagttggtatgtgcctgaggtaggacagtgaatgtatattgctggctgtgcctgctcaaggaaaatggtttctggtggtctttattagcagtgctggataagaaagcatggtggctcacgcatgtaatcccagcactttgggaggccaaggcaggaggatcacttgaggttaggagttcgagaccagcctggtcaacatgatgaaaccccacctctactaaaaatacaaaaattagcctggcatgatggtgggtgcctgtaatcccagctacttgggaggctgagataggagaattgcttgaaccagggaggcggaggttgcagtgaaccgagatcacgccattgcactccagcctgggcgacagagcgagactccgtctcaaaaaaaaaaaaaaaaaaaaatagaagaagaagaaggagaaggagaaggtgaaggagagggagagggagagggagagggagaaggagaaggagaagaaggaggaggaggagggtgtggaggaggaggaggaggaggagggtgccactgcactccagcctgggcaacagagtgagactgcatctcaaaaaaaaaaaaaaaaagaaaagaaagatagatcttctagactcttccaatttagatgaggccgtcttgaatgacaactcctctctaacattttaaccttcctaaacatttgaatctctttctccgtagtaaaccaaggcaggtctggcatgttgagtctaatcactttgggccacctttggtggaaacctccaccctaatgaccccttgatggtcccaggcacctgtggcgactcacctctggcctctgttatttaatgtggatccatctacacttggagacttccacgcctctttttctgctcatgatattgatgttctgcatatttcagaaatacttcacgtacatttctccattagggatcccagatatgagatcttgagagaacacatcaatcatccaacgctatgatcctatcatatcccaaacacttcatgtgctgacctggtctggaaatgaagcacagatgagcctctcccatgtgtcaggaaccactgaccccacaaccactgtgaccagtgggatttgtgacaacaagctgcaaaggaagaaactgaggctcagagatggttcattaccgcccgaggtcacgtaggcagtgaatgataaccagtctctgaataaatatcagcttcctcccccactccccaaatcaaagctcaaatataagtcattgttcccaaaacgttgaacagggattaaggtgcagagggacggccaaggatgcaatgggcaccgaggaggcaggaaagactcagaggtttgttcccagggacgtcaggggtggacgctgtagccaaaaaaaaaggggggggaagtaaaaaaaaagggggggattactattgattagaaagaaaacctatagtccagggccacaaagagggtcatgacttcctctctttattccctgcatttctcctctgttctcactgccacacacagctcagcctgggctgcacagccaggtgtcaggtgcgtctctgctgatctgagtccaccctgcagcatggacctgcatcttccctgaaggatctccagggctggagggacgactgccatggtaaggaccccacaacgctgaactgatggatgggctgaaggagggagggagaccttgagggaggctgtgagagggaggaggtcgccctcacctgaaaggggtgactcaggaaagcattggttctttttcctgctgcatcccaggtcttagtgagatgaagacaaggcagacagacagtggctgggggtcaggaaagaccccatttctgtctgaaatgtctatagaggagttgggcccacccccacctcagccctacaggaaagacagccaggctcctgggagggcagttccacttcctgtgtggctgcagatgacaaaaccccatgagaagaaggaccgagcctccaagtgtccacaccctgtgtgtcctctgtcctgccagcaccgagggctcatccatccacagagcagtgcagtgggaggagacgccatgacccccatcctcacggtcctgatctgtctcggtgagatttgaagagggagggagcttctaacctaggagggacctcaccccacagccaaactcttgtccctaaggagaccccaggggctcacaaagatcccagggaggggaggacctgctcaggcttcaggggcaaattcctcatagggaactctcttccagggctgagcctggaccccaggacccacgtgcaggcaggtgagtctgtccctagctgtcccaagtccctcctcctcaccggggacaaggggccacccctgtgcagctggggatggggaatagcagttctgggctgactgatgggggtgtctggagggtcctgcagctgagagctgagatctgttgggtgggaaatgacttagaatctgaactctgatttccttccagggcccctccccaagcccaccctctgggctgagccaggctctgtgatcacccaagggagtcctgtgaccctcaggtgtcaggggagcctggagacgcaggagtaccatctatatagagaaaagaaaacagcactctggattacacggatcccacaggagcttgtgaagaagggccagttccccatcctatccatcacctgggaacatgcagggcggtattgctgtatctatggcagccacactgcaggcctctcagagagcagtgaccccctggagctggtggtgacaggtgagctgacactcagggatcccagccccaggctccgccctcaggaagggggtcagctctcaggggcttctccctctcacagcccagccctggggatgacgcgggaggtctgagccccatttaacacggtgcctccttctctcctaggagcctacagcaaacccaccctctcagctctgcccagccctgtggtgacctcaggagggaatgtgaccatccagtgtgactcacaggtggcatttgatggcttcattctgtgtaaggaaggagaagatgaacacccacaatgcctgaactcccattcccatgcccgtgggtcatcccgggccatcttctccgtgggccccgtgagcccaagtcgcaggtggtcgtacaggtgctatggttatgactcgcgcgctccctatgtgtggtctctacccagtgatctcctggggctcctggtcccaggtgagaaattcacagcattgcctggggttccctgagtctccctgagtctccaggcaggtggggaggagccgcgtctcagggcagctccaggtgggatgatgttggggcgagagggctcagggctcctggggccagagacacaggaagatcagcagtggtgaggccccgggggagagggaaagtttgtggggaagcctgagggtcggctcctggaaaccatgagcaccttttcccaggtgtttctaagaagccatcactctcagtgcagccgggtcctgtcgtggcccctggggagaagctgaccttccagtgtggctctgatgccggctacgacagatttgttctgtacaaggagtggggacgtgacttcctccagcgccctggccggcagccccaggctgggctctcccaggccaacttcaccctgggccctgtgagccgctcctacgggggccagtacacatgctccggtgcatacaacctctcctccgagtggtcggcccccagcgaccccctggacatcctgatcacaggtgaggagcccagcgggttcagtcagggacccaggctccgcaaaggccctgctgggggagcccaggtggtgatggccgggatgaggggtgggggtcctaagggagggagagacagacagtgacaggggtgggcggggaggggagactcagagaaaacagagacagagagactgagggtcccagggagaggcctggggaggtctcagctcagagcaaggtggggcagcccctcacccatccttcttctctccaggacagatccgtgccagacccttcctctccgtgcggccgggccccacagtggcctcaggagagaacgtgaccctgctgtgtcagtcacagggagggatgcacactttccttttgaccaaggagggggcagctgattccccgctgcgtctaaaatcaaagcgccaatctcataagtaccaggctgaattccccatgagtcctgtgacctcggcccacgcggggacctacaggtgctacggctcactcagctccaacccctacctgctgactcaccccagtgaccccctggagctcgtggtctcaggtgagggccctgaccctgtcctctctgagctcaaaggctcagctcaggccctgcccccagcagagctctgggacaataatgaatgaggggagtgaagggggagggtctgcaggggagggtccagaccatgagagggtggaaatcgacagggacctctcacccctggctcccacccctgaagtcccagtagagtaaagagcagggagggctgggaggagatggcggggccggggggtgaacctcagaggagaggagattagactgagagtggaagacagaggccccacccgctcccctcctgatgtctccacctcagaatctgagcctctgggtcccaacctctaagtcctgaccccatgggtcacaaaaaaaaacagccactcccagctcaagagaattttctagactcatctcaatgctacctccaatattcagggtctgatttccagggaagcagaggggagggtggacagtaagggtgtggtctgcgtggctccctggggctccagggatggggcaggtgttccctccgtagtgttcagaggggagggaggtgtctaagattcagcattgatgagtggagcagcggggtctttccccctccctcagcaggattcccaggagccgtcacctctcattggagagccagggtcaggggagatcacagtcaggtacttggtctaggagtcaggtgggaggagcccggggaggtggggctgggtctgtggtggttcagcctctccttgggaggtggaacttctgaaagagaccgttccccttgcaccctggactccccatctgaataagggggagctgcctggatgtgaccgccccaaagccccttcatttctgaccttctggggcatctgggatgtggctcaatcctagacctgctctcatctccagccatctctggccctgtcctgattctccaaataactgagacttgtaagggttaaaaagccaacagagatgggagcgggtgcatgcagtttcactcatccctcctggaacctcagcttagtaagacaaagccacagtattttgaaacaacaaaggtttacaaagccccactgttttagaatctgctgtctttctttttttttgtttttttttgagacggagtctcgctctgtcgcccaggctggagtgcagtggcacgatctcggctcactgcaacctccgtctcccaggttcacgccattctcctgcctcagcctcccaagtagctgggactacaggcgcccaccaccacgcccggctaattttttatatttttagtagagacagggtttcactgtgttaaccatgatggtctcgatctcctgaccttgtgatgtgcccgcctcagcctcccaaagtgctgagattataggcgtgagccaccgcgcccggctgtgtttggatgttttaaagcacagtggcctgagggaaactgactgggcggctccctgtggcatgggaaacccgggggaggtcagcgggggctacagtgcagcccagctctgggcctggggggttcatgtccaatgttgtccaatcactggataattctaacatctaactaaacctcttttataggaaaaagagatgctttaaaattgttaatttaaatttaaatcagaagagggcaatttggtaataagttaatatgaaatacaatgaatatacccaaaccagtagctttctcatgggtacttatcttttgtttaaaaaatataaaggaatcaaatacttcacttataagttgtcaaaggtgttgaataatttgtcatatgagttacctctgaatatgtctcttctcctctgttttgattctcaggagcagctgagaccctcagcccaccacaaaacaagtccgactccaaggctggtgagtgaggagatgcttgccgtgatgacgctgggcacagagggtcaggtcctgtcaagaggagctgggtgtcctgggtggacatttgaagaattatattcattccaacttgaagaattattcaacacctttaacaatgtatatgtgaagtactttattctttcatattttaaaaataaaagataattatccatgagaaagctactcgtttgagtatattcattgtatttcatgctaactcactaccaaattaccccattctaattgcttttctatggatctcctctaatttcctgatgaaatgtatacaaaccatgagacaatggagattttacttatttctatattgcttgccaatattctcacttcaaatatcaatatgtatgtaactacatcttaaatatctaaagttttacatctatacatatttatgtgtggttatataagttacatttgaatatgtgtgtaagtatttccaagttcacttgataaatatatccatattcttaatatatttgatggccaggcgcagtgactcatgcctgtaatcccagcactttgggaggccaaggcgggcagatcacctgaggtcaggagtttgataccagcctggccaacatggtaaaagcccatctctactaaaaatacaaaaaaaaattagccaggcatggtggtgcggccctgtagtcccagatactagggaggctgaagcacaagaatcacttgaacccgggcggcagaggttgcaatgaaccgagatagtgccactgcactccaacctgtgcgacagagtgagactccatctcaataaaaataaaaataggccgggcacagtggctcatgcctacaatctcagcactttgggaggccgaggtgggaggatcatgaggtcaggagttcgacaccagcctggccaacatggtgaaaccgccatctctactaaagatacaaaaaaagtagctgggcgtggtggcgtgcacctgtaatcccagctactcgggatgctggggcaggagaattgcttgaacccaggagacggagcttgcagtgagccgagatcacaccactgcactccagcctgagcaacagagcaagactctgcctcaataaataaataaataaataataaaaataataaataaataaataagacatttgatgtggtaggagtttacatgtttgttactggtctagattcacctagattcacactttgtaaaagcagaaatactgatttatgaacctctaatagcaccactatttagcagacagatatttttggatgggggccggggggaaggtatcacatcattctaggttttcctgattatatgaagaattagttaattagattaattggacaatgaaaacccaggtgaaggggaggcagccccagactttcaccgctttgtgcttctgacattcgggagcccctgaggaccaacccctcatccagggagcctgggtcctcagctggtggatccgtgaaactctcatctccgggggaattggctcatgtgctcccgtgtcccaggctgcacagacagcacacagggctcagtgacctctgtactggggaccactttccttgcagatcctgagccctcagggtgaaggaaaactctcccccaaatgactcaagagcaacatttggatttgtagaaagcaggaaagctgaaataattcattaagaagaacgga

SEQ ID NO: 5700 - DNA, 145178 bp, Homo sapiens
  TMC2 gene - 2465253 - 2570430 of chr20; NCBI Entrez Gene ID: 117532; Build 35; sequence includes 20,000 bases upstream of initiation codon and 20,000 bases downstream of termination codon of the gene
atgagggtctggtttagcgtcaagggcaagtgtcaagatgaaactgagggtcagggtgaaggtgagagtgagggagagtgaggtctagctgaggatgaaagggagattgagaaagagagagtcaagtgcaattcaggtccagtgtatgaggcttaggtcaggtttaaggcaagggttgggataagggttatgatcacattgagggtcaggttgaggataaaggtcaggctcaaggccagaaagtgttagggtaaaggtgggcgtgaggttcagggtcaaggagaagatgagagtgagttgacattgaggatgtccttcatgattagtgtcactgtcacggtcattactttttgtgacttacaacaaatctggatgaacctagtcaatttaagtcagaatcatacattcatatctaaggtaactcactatggtgaattcaatcagatgtatatgaaagtaagcagaatacttgaaaacagcaaaccatgcttccaactaaggttcaagtccaggtttgggaatatttcaaatgatatgtttcattgtgcattagagcatatttaaatgaaaccaagctgtttatgtcaaacgagctcagaatctatcattcttcctgaatgagactgagtgctccagagaaatagaagcaacagaatttgtatgtgtttatgtatttgtatatgtatatgtatacacacacacaggtatatatacaaatatacacacacatatatacacattcagccaatgtatatgtgtgtatatatatatacacacatatatagctgatgtatatgtatatatatacacacatatacatataccaggagagccgatggtgcagttccagtccaaaggggcagcctgctgaagaattccctctggtcttttttttttttcttttttgagatagggtcttactctgcactctgtcacccaggctagagtgcagtggcatcatcatggctcactgcagcctcgacctcctgggctcaagcagtcctcccacctcagccttccaagtaactgggactacaggcacacaccaccatgcctggctagttattaattttttttttttgtagagatggggtccccctctgtcacccaggctggtcttgaactcctggcctcaagtgatcctctcacctcagcctcccaaagtgctgggattaaaggagtgagccgttgcccttggcctcaatttgttattgcttattagaataaattgacatgaaagtaagctttaataataataataataaaagatgagaaacacaccgtcatcaaaactgtacttagagctaagacaaatggaaacattatatgtgaaagacatctcaaaatcacatattgtccttaataaaattttaaaagtactcaaaggtttatttttttttccttttttctctctttttttttttcgagacagagtctcactctgttacccaggctggagtgcagtggctcgatctcggctcactgtaacctctgcctcccaggctcaagtgattccccttcctcagctttctgagtagctgggattacaggcgcgtgccaccacgtctggctacctttttgtatttttttagtagagacgtagtttcgccatgttgaccaggcttgtcttgaactcctgaactcagacagtttgccgaccttggcctcccagagtgttagaattacaggcgtgagccaccgcgcccagcctcaaagatttatttctatttgggagaattataatgaatcaaaagcagtattcgtgtaaatgagctcattgtcacattgctcttaaaagatccttcttattgccagttagagcaaattaagtagaatctagaattctgaagccaacatagaatcactaactgttgtcaaataatcttttgtactccaaagtactccaaaatacacaatagtactcacaagtgccagactctaacttctgatttctaaatagctacccctccggttccacactcactcacaacctacaaccctcccttacagacactaccttccaacataccacatgctctcagccccgtgtccacttccctacaccacttgcttcacatccactcaatacctatgctctgacaatcacccacacaccacctacctctcccctgtaaaccattcagtgcctacccttgcagcccacacccactgataatggtttggctctgtgttcctacccaaatctcatctcgaattgtaatccccacatgtcaggggagggacctggtggaaggcgattggctcatgggggtggtttcatccatgctgtcctcatgatagtgagttctcacaagatctgatggtttaaaagtgtttggcagttccctgcccccctctctctttcctgccatcgtgtaagacatgccttgcttccccttcaccttccaccatgattgtaagtttcctgaggcctacccagccatgtgcaactgtgagtcaattaaacctctttcctttttaaattacccagtcttgggtagttctttatagtagtgtgaaaatggactaatccacccattcactactttctgacccatactcattctctacttactccctcaaataccccgtgacctaccccacattacataccaactcactacccacaccctgccacagactcctttactacgctctcataatgattctgacactgacaccctaatcctgactgtgacactgactctccctctgaccctgtacctccagctcactctcacactcactctggtcctaaccatgaacctgaccttcacactcacactgactctggacttcgccttcagatttgcctcacctcactgaatagaacaaaaagaccagcctccttgaacaagaggaaattcttcagcagactgcctttagactggaactgcaccattggctcccctggggctccagcctgccagcctccataattgtgtgaagcaattccttatactaaatctccatatgtgtgtgtgcatgtgtgtgtatacgcatatacatacacattctattggttctgtttctctggagaaccctgactcattcaggaaaaatgatagattctgaactcatttgacataaacagcttggtttcatctaaatatgctctaacacacaatggacatttcatttgagatgttcctgaacctggacctgaaccttagttgaaagtgtgatttcctgcctgttttcaactgttctgtttagtttcacatatatttaattgaattcaccatagggagatgactctgatttaaattgcctaggttcatcctaatttgttgtaagtcacaaaaaaataaggaaatttagagaacaaggtgtgattgtaagattattttctctaatactgcttagattcatgtaatttggctctaagttatttttatctgctctatctgaccatttcacacttattaagaggggagagtctgtttcttagcttgtttactgcttggttgtacatagtttaatctatatttctactaattcaacataatagagtactttggaggataatgactgcttctgagctaagtttcactaatactgcttagattcaccttaatttaatgcactttaagattctatgtttgtattctacatgcactttatgagctagtttgtatatactatgaagtttatatatcatttattaaatgtataaatttcatttataatggatgagtgattttgaacttgacttcctttatatcacctaatttatgtgctactagccaggcgtggtacctcacatctataatcccagcactttaggaggccaaggtgggaggatctcttgagcccagaggttagagatcagcctggacaacatggcaagaccccgtctctattaaaaagaaataattttttaaattaaaatatgtgctacctatgcctagctacattttaattattcctaagagcctacaatcgcttttcagaacaatgtctgattctgagcttgttcattaatatactgcttattttattttattttattttactagatatgctctaactcatcttaaagaggagaatcagtgggaaatgggtctgggaagatcattggtcagctctggtcccagaaacttgggcaggcaccccctgtaaagcacttgtgaacatggggactcgtcttctacgccgaaaagtggtgactcacaccataggcaagtggcagatattcagcctctggaagagaatattggggacagttgctggcagcacaggttggcacttggactctgaaacaaaaaatggggacttcacttctggagggagaggtggggacacagccccagggcaaggggaggggacttagcttcttgggggagatgcagggaggaagcttctggagtgggaagtctttaatgagtggcatggatttagtctgtagaactgaaaccaaaactcatcttttagaagggataagtgtagacttagcctttgggacaagtggtgaggacatagcatctggaaggagaagcaagaatgtagcctctgctgagggaaatgaacgtgtaatctctggggcaaaagataggtacttaacctctggcgttgaaatccagacccagcctctggaagaagagtggacttaccccctgggcagatggtggaaaccttgcttatggtacaagcattgggaacttagccactggagtcataatcagggcaggcatagactctggggcagaaagtggaaacttcacctctggggtgaacagtgggggcttcttctctggagtcagatggggactcagcattgggaagaatacggtggactttttatattctggagacagaagtagcctttagggagagaggtagagatagcctgtggagcccaaatccagatgtagcctctggagggagaagtagggccctcacctgatgggagacctctggggactcagcttccagctctagaagcagagacctagactcaggtgtgggtagtgggatgtagtctctgaggcaagagatgacttctgcagtcagaattggggctcagcctccggagagggaagtgtggacctagccagtgggtatatggtggaaacttagcctttggatggagaagtaggatcttagtctctagcttctgtgtggggagtggggatttagcttctgaaatggaagatggggtcttagcctctgaagctgaaaatctggactcagcttctggagggaaaagctgggacatagacgtgggtggtcgcggtcaaaatcaatttctcaaaagcggcctttatgccaggccggaggggctccccctagcgagtgagggaagcaggacactttgaaacgaatgcgtttctcagcttctttgcacatgtaaagttacaaagcacttaagaagcatgtaaggtttgtttaaaatgaataagttattttgagcttgatttaacataaactcttagatatactctaagttactctaagaaggtccttttgagaatgcttgagtctacacttgttttaatatcaactgttacatatgaattatctctaaggagcaataaaagtgtggtgtaaaatgaatgagtaattttgagcttgatttcacctaaaatgcttagtactgactacatggagtctaattccacataacaagttaggttaaggacatattccttaatactgcttagatttatctaaattggttctaactcattttatttagtttctcaccattagaagtttccttagaggggaatgtctgattcttagcttgtttgcaaacactctacttgtttgtaaacatacatttttatttcaacataataaggtactttggagttaccttagacgtgacgcaacctgtttttatttaacctacttcatttgctcaaacttacaaaaagattacttagttggagataagtctttctgagccagtttgttcgtctgtctttctgagctaacgtactgtgtagttcacaataagtcaatctggctcagtttcaattttaacataagctgcttaattacatttatatttactccgactcataataagaagttacttttaagatcaaagtgtgaggtcaggcatggtggctcacgcctgtaatcccaatactttgggaggccaaggcaggtggatagcttgagctcaggagctcgagaccagcctgggcaacatggcaaaaccctgtctctacaaaagacacaaaaaaattagccaggtgtagtagcttgtgcctgtagacccagctacttgggaggctgaggtgggaggatcgcttgagcctgggaggcagaggttgtggcagcggcatttgatccagagcaactccatcttgaataggggctgggtaaaataaggctgagatctactaggctgcattcccaggaggttaggcattttaagtcataggatgagattggaggtcagcacaagatacaggtcacaaagaccttgctgataaaacaggatgtggtaaagaagctggccaaaaccaaaatggtgatgaaaatgaactctggttgtcctcactgctcatgatacactaattataattcattagcatgctaaaagatgctcccaccagcaccatgacagtttacagatgccatggcaatgtcaggaagttaccctatatggtctaaaaaggggaggaaccctcggttccgagaattgcccaccccttttccagaaaactcatcaataatccacaccttgtttagcatacaatcaagaaataactataagtatagtcagtccggcagcccatgccactgctatgcctatggagtggccactcttttattccttttttttttaaataaacttaccttcactttatggactcgcagggaattctttcctttttttttcttttttttacattcagaatttttattttaaaacaaagaatcagagtaacatttataatagaaaatccatatggaaatattcacaatcttctcagtgagaaatgggaaaacaacttccctgccttactgccatcctactgtttgaggagccagaagttgacttgaagttgcaaggtcaccttttccagctaaaccccactccatagctatgtgtactttttttttttttttttttttgagacggaatctcgcactctggcctgggctaggatgcaatggtgcgatcttggctcactgcaacctctgcgtcctggattcacgtgattctcctgcctcagcctccccagtagctgggattacaggggcccaccaccacgcctggctaagaattctttctttcttacacacgatccaagaatcctctcttggagtctggatgggacacctttctggtaacagttgcagtgagctgagatcgtgccactgcactccagcctgggtgacagagaccccgtctcaaaaaaaaaaaaaaaaaaatcgaagtgtgattctgagcctctttgaaaatactgcttaggatagctggtgtggcccactcccataatcccatcactttgggaggcctaggcaggaggatcccttgagcccaggagttcaagaccagactgggcaacatagtaagaccctgtctctctacaaaataaaattagctgggcatggtagcacacacctgtgctcctagctacttgggaggcttaggatctgcttgagctggggaggtcgaggctgcagtgaggcatgatcataccactgcactccagcctgggggacaaagggagaccctgcctcagagagagacagataaattatactgcttaaattcatctcaagtcgctctaactcacaacaaatgcttaccctggcagagaacgtgtgattttgaggttgctttcacacatacctgctagtgtccactaggtctccacttcttaccgtgaggctgggtttcgcgttctggttccaggctgtccccccactgcctgcccctgccccgaatcgcaggttttgccgcaatggcaagtcccaacttggccaacagggggcgcccgcccgaaccgccaggaccgagactcgcgagcttccgggcccagttcctcagattcagcgcgggggagagctgcgggccccgccgggggagcccagggggccttcgcagaggatctggaggcctttcagaaaggaagccaggtgcagggacgacccgaagcccggaccccagccccggcgctgcaacaggcccgccctccctgccttggcccttccctcttactatttttattttgagcgagagtctcgctgtgtcacccaggctggtctcgaactccccctcccaaagtgctgggatcacaggcgtgagccaccgcgcccgctggctcccgatcttccgcggggcccagacgccaaggtcccggctctccattcgaaagcggagtccccctctccggagtcgaatggaatccccgcttcccggcttcccgctcctgaggcttagtccccgcctctccccgaggggctcagccccgctgtttcctccagaggcggatcccgcagttttccccccagaaaaggaattcagcattttttatcctaggtctaacccggccttccgctccaagactaagtgatggtctacgccgccggcggccgaatccccacccgccctaccagaggctaagcccccacctcgcgcttaagggaacgagtcccgatctgtcgccgtagtgccgccccaggctgccggccgccgagtccccgttccctccgcacccgccaccccgcgtaggctgactccccgcttgccgccccaaaccgaagtcccaatttttagcttcagtggcctcagagacctgacttttccaagcttccataggaaggtgaggatggagagcatctggcatccggagcccctgtccctcggcacagccccgaggcctccggggggtcgggggaaagggttcggggaccgcaggggcgatgaagccccaaaccctgagccattctccgtgcttctggccttagagggacttgcgcacacatggctgagaatattaaccagaaaggtgttactgataccagaaaggggtcccgatccagaccccaagagagagttcttggaccttgggcaaaaattccaggcgattccatagagtaaagtgaaagcaagtttattaagaaagcaaaggaataaagaagggctactccataggcagagcaccagcgtgggctgctcaactgattgtagttacttcctgactatatgccaaacaaggggtggattattcaggagttttccaggaaaggggtgggcagttcctggaactgaaggttcttccccctcttttagaccatatagggtaacttctggacattaccatggcatttgtaaactgtcatggtgcaaaaaaaaaaaaaaaaaaaaaaaaaaaaaaagacacttttatcatgctaaaatattataattagcatataatgagcagtgaggacgatcagaggtcactttcctggccatcttggttgtggtggttttgggcaggcttctttatggcatgctgttttatcagcaaggtgtttggtctttttgtttgttcattcttttttttttttttcttttttttttttttttgagacggagctgtcacccaggctggagtgcagtggcatgatcttggctcactgcaacctccgcctctcgggttcaagcgattctcatgcctcagcctcccaagtaggtgggactataggcgcgtacctccacacctggttaatttttgatttttagtagagacagggtttcaccatgttggccagactggtctcgaactcctgacctcaggtgatccacccacttcggcctcccaaagtgctgacattacaggtgtgagccaccactctgggctagtaccttgtgcctacctcctgtctcatcctgtgatttagaatgcctaacctcctggaaataaaacccagtaggtttcagccttattttacccagcccctattcaaccagttgctctggttcaaatgcctctgacattaccaaaaaggaaaatgtaagctgtaatcacagtcagcaccaaattcaaaaaacttaatgaaacagtcacctgtgaaaaccagagacagatgtgtgaatatactaaaaaacacagaattgttcactttaaaagggtaaattttgtagtatggtcattatacctccatgaagctgttcttaaacaaaaaagactagttagacctcaggttttcccacttcagcagattcaaagttggctctttaagatgctggcatggtggaaagcactgggctgaggggtcttagacacagccaagggcaagatgagaacccatatgaaaacaagagaaccgggtgaaaattcgcctcctgatgagcggcactccgagccaccttctcttcctcagctcccacactggcagccaaggtgtgttctctgggaaaatgggaagatttttctctgggaattctgccctgcccagaagaaaaggcccataaacactgggagtgggaatctcttatccctgcctcatcaccctacagcagtgggtctcaaacttgagggacaccccccacccctgccgcaccttctcctggtacatttaacagtgcctggagatgctgtgggttatctcacctggcagcaagtgggtgttacaggtatctatcacacagaggccaaggatgctgctgaacatcttacaactcaaaagacagctctcacacaacgaagaaataactggtccaaaatatcactaatgctgagattgagaaacactgtcctgaagtgaggcccacccatcagcaaggcctgcccacatgcagaatgcttccacatagcttttcagcatctcacaatgaaatatgagcagatacccaagtgcccccaaacaataagacaaagattagaagagtgatgacttaaaagagtttgcccaagtgacagggagaccaatgttgtccctgacacatgcatctcaaagttgaagtctccctgcatccattcccactccctttgccaaggtcaaagctcactgagcagtggtccaaccacaggactgctggttcccaagcaatcttaaaaaagggggactcgccggctcagtggaggtcttctccactccaaactgtatgcatgaatacgctgacattctaggatatcagatgagctgaatcttgctagggggagtgagctctagaaacaaatagtatgtagaattcaaaacgtccaaggagaggggttcaggaggtatttcctatggcaaaagtggctgagaaacttaaagcaattaagttgtctctgctggggactttgctctcctgggctctgctaccacaacaccaggttatctccaaagggttggtgatgagcgatcgcacatcatagcctggcttagtgctgctctgtggaatagaaaggaagccctagagcccagtacaatagagagaatacagaagaggctggagatggggcagctgacaaggcgagggccacatctctaccaccatgtggccataccttcgtgaggcagtgaagtaaggaactttgcagcaggtgcattatggagcagaagaaaggggcaggctcattcgtgcctggcaaaagtggggcccagacgcactgcaggcctaggcactgaggctgggagtaaagtgatatgagcaggaatcccacagagcgctctcctaactcttcagggctttggggtgttctggttatggtcatattatctcactcagtccccaaagggctcttgcaggagttgtagcagaattacctccacccagcagatgaaaaaacggaggcagagaaagcttcaataacttgcttatggtagtgtggggtgaagaggggcttgtcacccatctgatttcagctgacacctaaaaatggggtgtccgatttcagccgacatctgaaaatgggggttgactttgtttaacacttttgctttgaggagcattccagttgtccttatcccgtatgggcagaaggaacagagcccctgaatctaggctccctactttctttccctgactctgcctcctggggtggtgggggagaagcagacgaataaaaaaactatgacccatagtcaccagctggctgcagttctccttgtgggttgtgtagaccgtgcctcttagtctgtctggcttatatctggcagtaatcctcccctgcctttggagtaatggggggccctcaggtcccagatacctggatgggtccaacttcctgcctaagagtctgagatggcagagacaacctcagcagtttctcgaaaacaggacccttctgccccaccttcagtgctgatcaagaaaggtcaaggaaccaagactctgaccaaacaaacttagaagcactgttcatattacacaacccaaagctttcagggacacaccgctaccgtccagaatcctatggcctctctcccaccctgtgccacaaactaccccagcactgagctcattggtgtgggttcgtcggtggagggcagcatccttgagatagcgccagctcacgttatccagctagggtgttagctggcgtaactggatcctctccattgtgccggtttacaacattctgtgagcaacactggatgttttgtaagcagatacccacagctaattatatatatatatgtatatacttctaattggagagataaattaacaagatggcccaagaagcttccccaaataagggctttggggacaaaagcacccctggatttgaacgccctgtgacttttggtggagactgcacatgttatttttgttgttgtcgtattgggtcctggggtttcattttctctgagcaagccacatccatgaaagagaattagcacagagttcaccctcctcagctccagcaatagggacattcactatcctgataacattagggcacaacactctgatattattaattttcagaataatgtttgagttgcatgtccaataaatgttactcaaatagtattagctaaagtattgtgttaagaagaataaagaaaaagaaaaggaatatttcacaaaaagttaaaaacacatttttgtgtcactttttttttttcttaaaagttgcaaatgtgtgaaatcaagaggtttccagttacggacatgtcaagaccaccatgaagaaaaggcaaatcttgatgaggcaaaaaccaagggcagagcagagagggagtcttcccagaggctggagtgctctgctcagacaccacaccccacctggcagtttgctagggttatcgctctgctaggaaacatcattccaagtcatattgtaaaatgctgggtgggcagtgtgcccaggggtctgccacatgtcctgaagtcagcagtcttcatagttgtgcctcaggcaggggggatagtgggagcaaagacaaagagaagttctagtacctcgaatgagagcaagtcacatcagtgggtaggaatagctgcactgaaagagagaggcagagggggctggagggtgttggagctctccggggccttggatggcacattagagagtctgggttttacccctaggccatggagtcccagcgaagggttttaagtagaggggagatgaagtcagacctctgctctgggggctgccttagctgccatgcaagagagaaactgaagggcagggccagcagcccggtgcccaggtaggaggcaaacacggggacctttggaaaggaggatatggtgtggtccaggtttttcccaagaggtcagaagagtgtagggaataaaagcctgggctctggagtaagaacagtcaacagggctgaatcctgtctccagggactgctgggacacatcacatctaagcctccattttttcatctgtaaagaaagataagacaatctgcctcaaatggctgttgtgatgattcaataagtcatttaaaggggttggcaagttcctggcagaaaggcagtgacaggtaactctcagctgtggctgtcttgaagggtgggcttcctgagtgtgcagcctgcgcgtggctgctcatggctccacactcagaagcgccctgcacttggtctaatactgtgctgaaaaagtgaaagtgaaattctttttttttttttgagacggagtttcgctctgtcgcccaggctggagtgcaatggcgtgatcttggcttactgcaacctccatctcccgggttcaagggattctcctgcctcagcctcccgagtagctaggattacaggcacatccacccggctaatttttgtatttttagtagagatggggtttcaccatcttggccaggctggtctcgaactcttgacctttagtgatccacctgcctcggcctcccaaagtgctgggatgagaggcgtgagccaccgcgtccagcctatagtgaaattcttaagaattttatcttttgggctggacatggtggttcacgcctgtcatcccaacactttgggaggctgaggcaggagtactgcataagctaaagagttcacgatcagcctgggcaacacggtgagacccatctctaaaaaaaaaaagttaattgggccaggtgtggtggctcacgcctgtaatcacatcactttgggaagccgacgtgggcagatcattagaggccaggagttcgagactagcctggccaacatggtgaaaccccatctctactaaaaatacaaaaattagccaggcatggtggcacacgcctgtaatcccagctacctgggaggctgaggcaagagaattgcttgaacccgggaggcagaagttgcagtgagccgagatcatgccactgaattccagcctgggtgacagagtgagactctatctcaaaaataaaaaataattttaaaaaattaaaaattaaggctgggcttagtggctcacacctgtaatcctatcactttgggaggccaaggtggatggatcacttgaggtcaggagtttgagaccagcctgatcaacatggtgaaaccccatctctattaaaaatacaaaattagccaggcatggtggcacactcctgtaatcctagctacttaggaggctgaggcaagagaatcacttgaacctgggaggcagaggttgcagtgagccaggatcacgccactgcactccagtctgggtgacagagcaaaactctgtttcaaaaacaacaacaaaaaaaaaaaattagctgggcatagtggtgcttttttccggccccagctacttgggaggctgaagcaggaggatgatttgagtccaggatgttgaggctgctgtgaaccatgttcatgccattgcattatagcctgagcctgtgaagaagaagaaggaagaaggaagaaggagaaggaggaggaggagagaaggagaaggaggagggggggaagtctgatgggacaatggggtgcgtacatgagcagaggagataggaacatatgccgccctatttgcgtatcccatatatgatgccccatgagcacataattccagtgggcccacgacgcatgggagtttagcaagactcaaagccagtacaaggcaggggtgtaatatctgtggttaaatatgtaggaatgcttccagcccagaggggctacacttcccatttaatccagaacttgcttcaaacactaaaagaaggcagtggtgttctaagaagcatgacaactaagggaccctatcctattctttttcattcaagttacttccctggattagccaaccacgtaggctgacaataatgacccagaagaaaaggaaaagatagagaaacccataattccttttttttcccagttctttttcactcatcagtaagccaaaggcaggaaacattggtagaatatgcacataccaagacgtgaagtaaaaccattgagttggctttgtgcagcatttctacagtcctgataagcctgaaatcctgcacatatacaagctacaaaatacaaattgtgtcatttcagtgattccacataggagttaagtactcttatacttgcactgaaacctgttattgctcgatatacagatgaacagtgggatccatgcaaataatttaaaattttgagttttctcagaatgacgttaaatagtagaaagagaaaggctttgtattttagtatctttaactgttcatttttcttgctttttggacaagggaccccacattttcattttccactgggccctgcaaattatgtaggccgctctgctgcttttaatattaaccctcgggcggggggtgagtgaagactggggaaaaggcagtcgaatcctaatagtcattggaggctagaaggacagacatgttatagaatccttgcatttggttcagagatacaccttggattctatgtccaagcagatgggccagcctaggggtgctcaggcctgtcccactctcctcttggaccttgtctcccccttggtctaagtgagcatcagcatccctgctcccacctccccatgcccttcatccctaccagcctagctccctcagttccctccccagcctatgcaggaggacgagcagctgcctttctagaaaaggcaacattaggcctggttccctaacagcagagcctgagacggggcaggcgggggtggagggtgctctcaggagaagaggcaagaagcaggacagggcaggagaaggggatgagcagagaccccactggagtccagcttctggctcatctcacaggaagctctgggatgtgaatgacatcaataagttgttcccatttttgacagaggccgggctgtcatacctctttgttcatccatctgtggctgtaggctaatccggggatggtgatgggattacctcagggttcagcagcccctgctcggccaaaggcaattctcctccgttgaaggggtccgctatgtgccttagccctggaggatgggtgcacttgctctgagagggaatctgggcagatcactggcagtgtccactacggaatctaaccctgaacaacaaggaaaccacagcccagaagtgaccttcacaagaaggcacttggggatttaatggtcagcccaagtcaaagccacatatcccagcttccagacccagactcaattgatctcttgtcacagacctgcccaggagacacaagggctccgcgttttttcattttcttcatctgacacatgggagtgacaacactgtctcaccgggctgttgtgagaaatagagaggttggggcaagagtgccccaggcaggacctagcacagagcagtgtgcaacacacatgccacgaggataatagttttaagacatcactgtcgttttctttctcacactctctgatgtgagacctgctccctcttgcctgaatgtgtattcatctcaggaagcattggaattgatctaggtggcgtgcaaagaaaaaagcaaaatactctgtgttcagtatctgacttccaaacttggatttttgaattccttagaaataattgtggaaagcagggtttgttgtgagagagaagaaatctgccaattcctagatcactccttcagacaccaagggctaaacccagccaccagacagcaaaaacacatcagcccctgaggacaagggtctctgtttcatttgctgatgaatccccagagccgagaactgactctgaccccagtgggtgctcatttttatctgtgaggagaaaagtggagttatcgactgtgtggacagtcaggtacaagggaatttgatagtcctatctggagggaatttctctccggagatgaaggtgttgtagaaagcctttctcctctggcaacagagaacaacaagagcagggtaaaggcaggaggcggagcttgcagtgagccgagatcgcgccactgcactccagcctgggcgacagagccagacgctgtctcaaaaaaaaaaaaaaaaaaaaaaaagagcagggtaaagggctgctgggggtcctcactcatcaggggagagcgcttggggcacccccagcagaaaccttactcaccagtcctctgggccacgctgtcctgtggctgcacagctgcccgtgctgcttctcacatggaccggggtcctgcactggcatggccctggtggggagagggatttgcggctgcagtcctgcagtatggatgccagagaatgcaactgagatcctcccactgccctcatgccccggggactggggcggccctgcaggaaccagttgggtcggagatcaaggtgtgggacaaagagaaaagcttcaaagcttgagatgaaccgttgcacgtgcattttagaggtagctcctttgccccttccctcgccaagcttgcatgaggacaggcactcctactcctgacccctgagaaagtacatgggcatgatcagaggctaggtctgtccttgacacccacaggagacttgccctggggaaggctttttattctgttgtgtcatagaatcctttggcatcctggtaaggtccgtagacccctttttatatttttttttatttttgagacagagtctcactctatcacccagggagtgcagtggtgcaatctcagctcactgcaacctccacctcctgggtcaagcaattctgcctcagcctcctgagtagctgggactacagacacatcccaccacgcccggctaatttttgcatttttagtagagatggggtttcaccatgttggccagactggtccggaactcccaaccctaggtgatccgtctgccttggcctcccaaaattctgggattacaggcgtgaaccaccacgcccagccacagaccgcttttcagaacatagacattaaatccataaaataaaacactaggattacaaaggagaccaatgatcctgaaataggcatcaaaatcactttaaatatctttcatataatgacaatatatgcttcctaattaaataacaagatttcatggcaggtctctaactatcataattttgaagttgtgataacatgtaagatattttgagacatccccagtggtttaattgggaaaaaaaataactgtgacttttgctgagacaaaaatcacatctttgcttacattcatgattgagggaaatgctaaatcgcagttaaggctaggaaaagtgaaagtgtagtattttctccatcactattcacaaacccacagaattccatccacagctctgggggttccagggactccagattaagaactccacactctgagaccttatgactgccttccagagggtccctctgacactttagtgatggttttcaaagcagccaaatctgtgcctccctgaagccagggaggaaaagctgctgagggagggggcgggggctgagcgggaacattcatctgtgtgggctcaggacgcctgcagcaggatccacagtgcaggctcccagggcctggcacagactgactgattccaacgcccagtgccactcctgggagtatgcattttatttttaaaaatttattattattatttttctttttgtggagatggggtctcactacgttgcacaggctggtcttgagctcttgggctcaagcaatcctcctgcctctgccttcctaagtgctgagattacaggtgtgaaccaccacatgccagaatctgcattttaaacagaagcccaagtaataacttaaacaaacattctagaatttccctggtgctttgtcccaatcagggactcaagatagtgggagagggcctgggatgctcctcacacctcctctggctagagtgccagcggcatcattgccaggagataagcctgcagctcctggcccctccagggcccctcatgtataactgatgcctgaaacatgaggccatgctgcctctttgcagggaaacctgagaagaggagtgtgtggccggattgatgggccgggaactcgtcgccttccttcacccgtctctctcccccaaacttcacccacctccacattcaatctcaaaccaagaagccccgcctgctgtcaggtctaggaagggaggccagccaccatgagggcaggaaagcagcccaggctgaaggcgtgcatacaggagcacgctgcgtgagcctgtgcaggaccccagcagtgctgctgaccatgagccaccaggtaaagggcctgaaagaggaaggtgagtccacgtcctgatcctgcggggcccgcccacagggttcctgggcagcagcaggggatgggggaagcacatatggtgttcagaggcatagggaggagctgggtttgagtccagggcctgtcccctgtgcgctgagcgacctcggctggttattcaacctctctgatcctcacgcatgagatgggggtagtcatcacctccttgcagggctactggaaggattcaagacaacctgtgcacagcacctgtgttcaggccagcactggagactgtcacggccgatgcatgctcctcagagcctgctggggcgtctcagccacctattgtctcggttagggttgcctgttccgagcaagcccctcagcagatttctatctgtctctgtctctgtgcagggcagggggtgggggatgttctgacctcatgactgacagtatcagacaaatgtgacaggcaggggactctataatttgctgagtaaaatcattggagctgggtcccagtttgaggcagccacaaatcagctgaggggtcccacagtgaccgggggtctgcagggagggggactcaccagaggccagccatttgtcagcaatcctgtctcttacagcacgaggcggagtgaaagggcgggtgaagagcggctctccacacacaggtgagatggggtggtggggtctctggggagcctgcagtgcctgggtgccctctgcttagcccaacagtccagccacccatccaacattctccttcatctccttccctctcattcaacaccctgcatggagccttcctgggaggcaaggtgtttaacatgggagggggcagagtaccactcagagaaggtgctgctcagccctcggtgtcaggggagactcccagggttagtgacactctgagctgagccttgggaagcagtgaacattcaccagacagagggcagggaagctcggtgcaggcttctggcgggtggtgtggccagattcacatccaggcccccggactctaggaggaacactcttaacctccaaaaagtagtaggcataatgggtgctccatcaccttcccactgggaatgtgaccacagctctcccgtgagccggtgagggagccaacttgctccaggagaagtgggagagcccaaggaagccataggcgggagagaaaacccttggttgagactgagggttcaggggagaggggcagaagccacactcacaggctgggcatcttcatgtcacaaaatattatggatgcgatgctgttttctcccccttcacgtcccaggcagggctgggtcctgcgccccacactagtaggcaagaaaccagaatcttggggagtgatggggttctggggggttggaagagatctccttcctcccccattctgggagggagggccctttccactccctcctgtgggagggccctgtcctggccccactctggccagtagggagctggccccaggagccacttcatctgccctttccgctcctgtgacccgctgctgtctggttgtcgggagcctgagcttcagtgaggccgctgtgttacaaggggagagacccaggagcaggaggcaaggaagagctgggcagaggctggcagggggtgcagccatggcatctcaacagcccttcctggcccctatcccggaacttgcctcagccactgtcccttcttcctaccccacctgcctgcctcatccactctttatctcaatccaaagatgaaggagcaaatgtgagaaagttctatgccccagggtggccagacgagaaaccttcctcccgggggtcgggccacggtgctcccgtagtgaccactgcctgtaggatgctcaggctggttctccacaccccactcccctcgtagtcatccagatgccgtcccttccgcacccagcctggcctccctctgcctctgctgcagggctgtgctgtgcgggactcccctgtgagcagtagtccttagtaggactgaaatggaagaccattttgcctacaacacaaaccctttcctactgaaatattccacgttgccgctgccgttttccctttcccatagaacacaggaaattggtcagaattttcacttcacagatctaagtggtgaaggggtgcagtaaagttaaacattgggaatatattgaattaactgaaacccagccccatgaaggtttccattttaaatctcctctggagtcacctgcgacgggacctgatattctcatccttccctttatactctaccaggagggaataaaagtttaagaatacaatgttcttttctcagaatagctacagtttgttactgtgttccttgaaaagaaggatgagaactctccctcctcctgtatcatttggtaagtgcactgaactgttgagatcacgggactggagggctgccgcagcctctcctcggcctgtgttttgcactgtgaattctctgaccgagtcaggtgctacataggaggaggcctgttacatttaggagagcgtgtgctgggcttggaggccttcctagcaagacagctgcctttccagttcctaaattatgcattatgtggagtctgttgaaaactgattatgaaagagaaaaaaacagcttattttctgtgttgaagaggtctggggaagattgaagggcaaattctggcttgttttccacattccatgtgaatttcgttcagttggagaactaaattacagcaggaattacagctcagaaaaaaaattgtaacaccaaattatatctacagtgctgggaagtatgcttggtacagttcattaccacaatgaaaaccattgtattagctgactgaggacacagagagagctcagaagaggatgcaaacaatgacgttcctattcagtcctttcaagcaacatagagctgatctttatgggaccccagggaacccttctccatgatcccttgccttgatctctgcttctctgccctttctgagcactgaactcagtcctagagctctcttaggggtcatggctgtgataatatttgttttgctccgtcccttttgcaacagggggctactgccttccagagcattgcgctggagcatttgtaagacaaatcatacctcactggctaacactgactagcttcctaccctggataaattatgcaaaaatagtctttctttacgttgtcttatcaaagactatttttccacagggagtgagaagaagaaagaggttggggcaggagtgggctaaggaaacctgctctatgataaatacaggacaggttctcttagctcactcccgcaaatagcacacaagactattcttttcttttcttttcttttttttttttttttttgagatggagtcttgctctgttgcccaggctagagtacagtgatgtgatctcagctcactgcaacctctgcctcccaagttcaagtgattctcctgcctcagcctcccaggtagctgggattacaggtgcctgccaccacgcccagctaattttttgtatttttagtagagaccgggtttcaccatcttggccaggctggtctcaaactcatacctcgtgatccacccgcctcagcctcccaaagtgctgggattacaggtgtgagcctccgtgcctggccgcaagacttttcaatgcacctatgccagttatctcatcagtcctggcagaaacctcagcatttaaaaccgagtctcaaagacatggacatggccgggcacagtggctcatgactgtaatcccagcactttgggaggctgaggtggggagatcacttaaggtcaatagttcaagactagcctggtcaacatggtgaaaccctgtctctactaaaaatacaaaaattagccaggcttggtggtgcatgcctgtagtcctagctacttgggaggcagaggtgagagaatcgcttgaacctgggaggcggaggttgcagtgagcctagatggtgccattgcactccagcctgggcggcagagagggactctcaaaaaaaaaaaaaaaaagacatggagattattaatgatggcttcagacccatgtttggtgcctctttttgcctttaaaataagtgaagcaatcacagccagtatgctcacaagaccttccttgtagcagctgcagagcagtgtcaccctccccacatcaccttcttccatgttgctagtgtgaccctttgatgtagaccttgccccagcaaacatgctccattatcacacccttaccctccagatttcaacccagctccctgtgggcgtgtacccctctcctcctgcctcccacaccagaacacacccgggacgcagctctgccttggacgcctatgccccagactccctggcatttctgctggggcccctcaatcccctgtttcctctgcctggaatcctcctaacttgctaccacaatcaccccctccatttctctacccacttcttctcttgcaaactcctgttcatccttcaagattcagagtagcccctaagtatgtattaaagacttcatggtaattatttttaattgagctgtaaaatattccacatagtagataaatcacaggttaattcattattctattactgaatatttaggttatttcccatttttataatagaaataatgttgcattgaagattcttgggcttgggttgactcctacaggtggaattaacagatcagaaagtatttttaggctgggcatggtggcttacgcctgtaatcccagcattttgggaggccgaggcaggcggattaattaaggtcaggagtttgagaccagcctggccaacatggcaaaaccccttctctgctaaaaatacaataattaggcaggtgtggtggcacacacctgtaatcccagctgctcgggaggctgaggcacaagaatctcttgaatctgggaggttgaggttgcagtgagcccagattgcaccactgccctccagactgggcgacagagcaagactctgtctcaaaaccaaaaaaaaaaaaagaaagaaagaaaaaaaagaaaagaaaaaagaaagtattttaaagctcttgttacatgttgccaaactgcataaagagttgctttacaatttatattgcgaccagtaataaatatgcattttaacaagtctcattagtcctggataaaaaattttaaaaacgtaatactataaacaagacaggaaatcccattattgacttattttaaatttcctttgataactagtaaaactgcattttccgccgtttcctaattgcatttccccattagtaacttacctgttcataagttttgcttaacggtctttgtgtcctcccccatattgatatgtgagttctttccattagtctcatgtttgattaaaaaattttcttatttgaaaaaaacttcagagtaaatgttggagaggagaatttttttcctctaccttcctaggttcagtgactacaggctctgtaaatcaaactgacaaaagacagatcaacaagaggggaaaaaaggattgaattacatatgtacaaatgagagttcacaaagaagatgactcaaggaggtggttagaatttggggcttatatactatcttagaggtatatatcatcttaaagggtgatagagtgtggagaagaagcttgacaaaggaaaagcgttttggggcttctgggtaagttatggaaggtgactaggaaacgtgtggtaaataagtgttattcagtaaggtttgttaagcaggtaagagtcttctcaggtgctaagagttgtctctggagtagttatcttccaagtataggagagggagaccccttccaaatggaaatatatgtcctgcttttagtccaaaagggcagaggagcgacatatatctaattgccttcagcttgaaataatctttatgccgaagtggcatattttgggatggcgtcttctagtctccttcataaacatcagttctttgtgaagcatttccaacaatcccagccataatttatcactccctttttctttctatatttttacagtcttttctctttagtccacaatttttttttttttttgacagagtctcgctctgtcacccaggctggagtcagtggcacatcttggctcactgcaacctccgcctcccgggttcaagcaattctcctgtctcagcctcccgagtagctgggactacaggcgagcactaccacgcttggctaatttttatatttttagtattttatacttagtatattatatttagtaatatacttagtatttagtattttgtgtttttctttttaaaacaaaatacaaggccaggcatggtggcacacacctgtaatcccagcactttgggaggccaaggtgggcgaatcacttgaggtcaggagtttgagaccagcctggccaacatggtgaaaccctgtctctactaaaaatacaaaaattagtcaggcaaggtggcatacacctgtaatcccagctactcaggaggctgaggcaggagaactgcttgaacctgggaggtagaggctgcagtgagccaagatcttaccactgcactccagcctgggtgacagagtgagactctgtctcaaaaataaaataaaataaaaacaaaacacatttatctaagttattgtccaaagctggctccctaacaccccacaacctgttgataagacaaaaccgatctattgcttatagcaggcaaagctttggcagtatcttacagaggggaaggaaggccggaacttactgagaattggaaatttgattgaaggcaggtctttcaaagtgagagctggaatgagactgggtgagaatcacaacataatagtccacaataaacagcatggccaggattttgaggtgaggcattcaaagaatcttagagcccaaattgaagaattgacaggtctttgggaaaatcctgtaatgaacaatcaacatttgcctgggtaggagatgcctagaaaaataaagacatgctcatgaagcagaggcgtagcacaaagtcatcttaatacagacactaaggtatagctgggctctctgtgtccagactcagtatgagggaagatggtttgagttctcaatttctccttgtggtcattcttcagcccaagctgaaggaaaagccatcagtatgtcaatctagatattcaccagtatttgagaggtcatcatttcatatcaattgtctgttaacagttgtttcacatccagtttctggtggcagctgtttcaacctgcatgtcagtttttttttttttttttgagacagagtctcgctctgtcacccaggctgaagtgcatggcatgatcttggctcactgcaacctccacctcctgggttcaagcgattctcatgcctcagcctcccaagtagctgggactacaggcgctcgccaccatgcctagctgatttttttttttttttttttgtatttttagtagagacggggtttcaccatgttggttaggctggtctcgaactcctgacctcaagtgatctgcctgccttggcttcccaaagtgctgggattacaggcatgagccaacgcacccagccagattttccagttctttttagtggataacccttgctggatgatttgaatgatggcagcagtgcagtagcatttaaaactctggagatcccacatctgaatgctggcacacagacaaatactaagagaaggattgtcatcagagtttgtataatctacttctcagccaggatctaagagtgccctgactaaacaagaaagtagatctcatcccgaatctagagtccatgtaaccaaatatgaggttactcatcaaattacccaatttctgatttctttgtttacttcctagatctttttagtaatatcaaagatttcagagaggtctgcaggaatataagtacagcattcttccactaaaacagcacacattccccaccttgggagatcaatatcctatctaaggcagttctgttctggaccaccacccacccaatctcataaacctcttgacaagggagttttatggccttactggcattgtctaaatcatctgctgttctctcaaccacagcatgctacatttaccctactaatcagatctcttgtaaattatgaaacaaaggctgggtgcagtggttcacacctgtaatcccagcactttgggaggccaaggtgggaagatcacatgaggccaggagttcaaggccagtctggacaacactgcaagactccatctctacaaaaaaatttaaaaattagccaggcatggtggcgcatacttgtagtcctagctattcaagaggcagaggcaggaggatcacttgaggccaggagttcaagagcagcctgggcaatataatgagacccctgtctctaccaaaaaaaaaaaaaaaaaatttaattagacatgcatggtggcacacacctgtagttctaactacacatgaggctgatatgggaggatcacttgagctcaggagtttgagactacaatgagttatgatgactccactacacttcactctgggtggtagagcaagattctgtctcaaaaataagtaaatacatacatacataaaggcatgcatacatacataaagtatgaaaagaagtgtcttgaggggagaagaaagaaatctagaatacccctagggtacttaggatttcagttctcaaaccagggcccagtttttctccttcttcaatgaaacgatctactgacctcgttttcctagagaacaaattaatagatgatatcatagacaattctgagagtaggttttagtttacaaaggtaacaagttcctgtctagtttgtgagtaataggaggcttctgttccttatccagtatctgtcactgggggccattcagtcatctggttttggccagaatactcctatgggattgtcaaataatgctgtaaactgttggtaccattcatcatgaatagtttggtgtcaagcagttaattatgtagttttgagatcactaagtaggtctaaagcaaacaaaagaagaagaagaagaaagaagaaggaagaagaaagaagaaggaagaagaagatgaggaagaagaagatgaagatgaaggaagaagaagacgaggaagaagaagatgaagaagaagacgaagatgaagaaggaagaagaagaagaggaagaggaagaaagaaagaaagaaagaaagaaagaaagagaaagaaagaaaaagaaagaaagaaaaagaaagaaatgaaagaaagaaagaaaaaaagaaagaaatgaaagaaagaaagaaagaaaagaaagggaggaaaaaataaaactaatgtcttacttgtaagatctttgaaagcagatagtctccaaaaatataccacttgttccccaatccgcttataattctgtcagtgaaagtctgatcacaaagactagctctcacaaaaggtccccaagtagtgttttatggaggcagggcccttctaggacatgatgaaggttttggatttctccccacctgacctattgtggagttgccatctaaaaagtcatccaatggttgagttcagttacccaggaaaccaactgatttcttaaaaggaactggaaccgaatgaaactgggtagctcctgaagaaaaatgtgcaccctagacagttcatgggttaattgtagctgggtacgaaactcataccaaggaatgattaaggatgtaaatagaaatattaaaaatagaagtcttataatttacataactaaagtagccttaagtcagggagaggataggaggcaggtaaaagaataggaaagagaagaatattgattatagagtagtaacctgcagagttgggcataagctgtagatcttgggcataagctgtctacatctgaggctgtctgctttgggaggtctcctaagaatctttagcttgaggtcaccaataggaatggttttctagtaattttaggatggtgtatgtctcttgagttgaaggacatgatcaactctttaagagtttcaccagcatgttagtcattacctaatggagtccttccaactggggttctaaaatagttctttgttgaagacaaaaactctggagagtttaaggaagctttgggggcaaaacaaatagtatctgtaggtgacacagacttaaactggttgagggtaacttattactgaaaactttcaaaagtgaaacatttcatgacaatgaaactgatggaaaatttggatgcttccacagcatgcaaaagaagcaatgaaggcattctaaaagctttggtcaaaatgtctataatgattaagcatgttttaatagataatgtacactatatctaatttataaaggtggataaccataatttttacagagaaaaaatcttgaagtataacatataattatctaaaaacataatgtacatgacataccaagaaaatatcaaacatataagaaaaatatatcaagactatatgaagaatatcaagtaaaaagattcagtaagtatggaataggtcctaaacatctacattttaataaaagtccatagatatgtctgatgttcatctccaatagaaaagcactggcctgaaggaggctagattcaaattaaagaggaaacattgtgtccaaataaacattttaaatgataactgaattataactgataattctactgttgtctaacatcaggcagagcaccaccaggactctaacaaaaggaaacagaccatagacaatggaggaattaacaaatctctggatatagaacacataattgctgaaatgtttgaacattttacctacacaagttaacctagagaaggctaaacatctcttctgatttgacaagcttcccccaaaaccctaacaacaatgtatcaaataatcctaattgtttctggcacctgtattttaaataaggtgaaagaacaagtctctgtggccttctaggagccctctgggaaatctcaaaggtagtcttaggtaaaaaggtattctgaaaggtatttaacttcatttgagagtcaatcttaaaaacaaacaaaattgtctggagagttgaacacaggaataacatttggctactcatttgaaagtggcaataaaacatttaaaatatttaaaaacaagcttagaaggtaaggtgatcacccactaagaaccttaactctttcataagtgaagaacctttattatcttaaataaaatttcttttctgcaaactttctgctattttctatttccattcaggttttgtccttcactgttctctttaccattctggaacaactaggcattttactttaggacaaaactattctttttttcttaacaaaaacacgttttattactttgcatgcaaagttgtacctctctatcaagactgatcataatagagtatcatttaattataacttttaaccaaaggatcttctgtttcacagaacaaactggtaggatggataattgtcaactgtcacacatcagcattttagactagcagagctcctgaatgtacacaacacaactttcgacaaacacacacatcttgtatacagcttctcaaaagggcagatatgaacatgtgtgttaacaggcccaaacatataacttctctgtggcatgttttaaaaaaagaagcaaaagtaaataaacttaaaattatgtttagtaatcaatgtttcagaatcctttcttacttagaaattagtggccaggtgtggtggctcatgcctctaatcccagcactttgggaggccaaggcaggcggatcacccgagatcgggggttcgagacgaggctgaccaacatggagaaaccccgtctctactaaaaatagaaaattagctgggtgtggtggagcatgcctgtaatcccagctactcgggaggctgaggcaggagaattgcttgaacccaggaggcggaggttgcagtgagccaagatagcaccattgcactccagcctgggaaacaagagcgaaactccatctcaaaaaaaaaaaagaaagaaaaagaaagaaattagttaggcatctaatcaatatccataaactcaataccagttcaaggctttataatacctaaaaatcttgggaattaatttccaagctggcatactacaaaatataattactgttcacaaaaatgttcagagtaatgaatcattttagttaagcacaaatttaggtattttgtaaccttcaacatcaaatagaagtaatgctaatatatttgatcaaggaacctatataagtctagaaacaacatactcaagtagaataaaaacgtaagctagtcttttacttaatgctgaaaaaccaaagaaggcatagctgtttttatgaaattaaacataataaattagttcatttgccaaatttttacctaatttctgggatttttaaaatttatttgtgttttttggttttttggttttgtatttgtttagaaacagggtcttgctctgttacccaggctggagtgcactggtgccatcacagctcacttgggtaatcccactctctcagcctcccaagtagctagtactatcggcacttaccactatcctggctaaatttttagtttttttgtacagccaggatctcgctgtgttgcccaggatggtcctgaattcctaggttcaaattattctccctcctcagcctcccaaagtgctgggattataggcacgagccaccgtgcccagcctaagcacttaatatcttaattcagccaattaaatgagctcttttattttgtcgtcatcgttgttgttgttgatgattttttgacttttttaaaaaatatttttccagccaggcatggttgcttacgtctgtaatcccagcactttgggaggccaaggcgggcggatcacttgaggtcaggagtttgagaccagcctggccaacacggtgaaaccctgtctctactgaaaatacaaaaattagccaggcatggtggcgtgtgcctgtaatcccagctactcaagaggctgaggcagaagaatcccttgaatttggggggcagatgttgcagtgagccgagagcacgccactgccctccagccaaataggaaaaatatttttcctatccttctgaagtttgcaactcctttatcttcagaaaaacttctccttgagagtttcctcagagcatctcattcagcaatcatttcattttttaaaaacagacttcattttttagagcagttttaggattggagaaaaattttgccgaaattacagagttttggctgtgtgcagtggctcacgcctgtaattccaacactttgggaggacgagttgcacaggtcacctgaggtcagcagttggagaccagcctggccaacatggtaaaaccccgtctctactaaaaatacaaaaattagttgggcatagtggtgcgcacctataatcccagctactcaggtggctgaggcaagagaatcacttgaaccctggaagcggaggatgcagtgagccgagatcacaccagactgcactccagcctgggcaacagagccagactctgtctcaaaaaaaaaaaaaaattagctccatgcagtgacgcatgcctatagttccagccactcggcaggctgaggagggaggatcacttgagcgtgggaggcagaggctgtagtgtgctgagattgtgccactgcactccaacctgggcgacagaacaagaccctgtctcaaaaaaataaaaattaaaataaaaaacttacatagagtttccacgtataaccttctttcctcccctcaccgaatgtttctcctagcatgtcgcattgggtgtgctgcgtttgttacaactgatgggccaatacggatacattattaactaaagtgcatattttacactagagttcactctttatagattccataggttttgacaaatgcataatatatcatgtatccatcatcacagtatgacacagaataatatgcccccaaatgtcctgtggcccacctattcaaccctctctccctcccactgaaccctcagcaaccactgatcattttttccgctgtctctagagtgtctctttctccagaatgctgtatagttacaatcatacagcatataaccttttcatattgccttctttcacttagaaatatgcatttaagtttccctcatgtcttttcatcgcttgaaagttcatttcatcactgagtaatattccattgtatttattaccgcagtttgtttatgcattcacctattgaaggacatcttagttgcttccaagttttgataattatgaataaggtggccgtaaatatttgtgtgcaggcttttgttttgggacataaattttcaactcatttgggttaacacctcggagtgcaaatgctggattttatggtcaatctatgtttagttttgtaagaaactgccatactgttttccaaagtagctgtaccattttgcatcctcactagcaataaatgagcattcctgttgttctacatttttttatagcattttgtgttgccaataagcatgtaatagtatttcattgatgttttaattcacagttccctaatgacataccatgttgagcatcttttcatatgcctatttaccatctgtatactttctttggtgagatgtctgctcagatcttttttccattttttaattgtttgttttcttattcttgagttttcatgtgtgtattttggatacacgtcctttgtcagatacatgttttgcaaatattttctactagtttgtgggtttttttttttaattctcttcacagtgtcttttgcagagcagaagtttttagttttaatgaattaaaacatcaatttttctctttaatggatcatgcttttggtatcgtattttattctttgtttttatttttgttttcatttatgctgtggtattttaaaagtcattgctaaattgaaggccattgcagttttctcctttgttatcttttacagttttatagctttgtgttttacatttaggtttatgatccatttggagttaatttttgtgaaaggcataaggtctgtatctagatttttggttttggcctatgggtgcccagttgttccagcacaatttgttgaaaaaaactatcctttctccatcgtcaaaggttggctatatttgtgtgggtctatttctgagctctctattccatcccattgatctaattctctttcaccagtatcacaccatcttgattactgtacctttatagtgttgatgtgtatgaagtagagctttagagtcttgatgtggattgtgctggatattctgggtcttttgcctttccatataaactttagaatcagggctgggtgcagtagctcacgcctataatcccagcactttgtgaagccaaactgggaggattgtttgatcccagggctttgagaacaactcaggcaatacagagactctacaaaaaaaaaaaattataaaattagctgggcatggttagtgtgcacctgtagtcccccctacttgggaggctgaggtgggaggattgcttgagagcaggagttcaaggctgcagtgagctatattcgtgccattgcactccagcctgagcaacagaatgagaccctgtctctaaacaaacaaacaaacactttagaatcagtttatcaatatccacagaataatttgctgggattttgattgaaatcgcattaactctatagacaaagctgggaagaacttacattttaataatgttgaatgttccatgtttgttccaaggaacattcatttatttaagtctttgagttctttgagttctttcatcagaattttgtagtcttcttcatatagctcttacacatattttgttagatttatatataagtttcatttatttgtttgtttgtttttgagacagagttctgtcacccatgctggagtgcagtggcacaatctcggctcactgcaatgtccacctcacgagttcaagggatcttcccacttcagtctctgacgtagctgggaatacagactcgtgccaccatgcccagctaatttttgtatttttagtagagacggggttttaccatgttggccaggctggtctggaactccggacctcaactgatccacctaccttgacctcccaaagtgctgggattataggcatgagccaccgtgacctgccaagtatttcatttttttagttctaatataaatggagttgtgattttaactttaaatttcagttgttcattgctggcgtataggagtaattgacttttgcatactaaccttgcatcctgcatcattgttacaaaatggcttattggttctaggaggttcttgtggtttattttgttttgtttttgtcaattctttgagattttctacatagacaattatactatctgtgaacaaagacagttttatttttttgttcccatttagtctactgttaatatccttttattatcttactgcattatctaggacttccaacacagtgctgaacaggtgacaggagacatccttgtcttgttcccagtcttgaggggaaagtatctagtttctcaccactaagtatgatgttagttgtaggggttttgtagcaattcttcatcaggttgaggaattatcccctagtttgctgagaacttttttaatcatgaatgggtgttgtatttttttaatgttttctctgcatctattgatatgatcctgtgattgtttttcattagctgttgataagatggattacatcaattgattttctaatgttgagccagtcttgcatacctggactaaatcccatttggccttggtatacaactctttttatatgttcttgaattcaattttctattttattaaggatttttgtatctatgtttataagagatacaggtctgtttttgtctggtttttgtgctagaggaatgctggcgtcatgaaatgagttaggaagtgttccgtttgcttctattttctggaagaaatgctaaagaaattgtattatttcttctttaaacatttgacaaaatcaccagtgaaatcatccaggcctggtgttttctatttaaaaggttattaattgccgagacaatttctttaataaatataggcctattcagattacttatttcgctttgtgtgagttttggtagattgtgtttttccaggaatttgtcgagttcttctgggccagcaaatttatcagcatcaagttgtctgcaatactcctttattatccttttgttttgttttgttttttgagacggagctttgctcttgttgcccaggctggagtacaatggcaccatctcagctcactgcaacctctgcctcctgggttcaagtgattctcctgcctcagcctcccgagtagctgggattacaggcacccgccaccatacccggctaatttttttgtatttttagtggagatgggggtttcaccatgttggccaggctggtctcgaactcctgacctcaggtgatccatctgcctcagcctcccaaagtgctgggattacagcatgagccaacgtgcccagcctcctttattatctttttaatgtccttgagataaatggtgacgatccctcttttatttctgatattaataatttatgtctccagcctgggcaacggagcaacaccctgtctcaaaaataaatcgataaataatgtatgttttctcacctttgttcttggttagcctggctagagggtcatcaatattatcaatcttttcaaagaacctctctatgatttcatgcttctctccatcgttttcttgtgttcaatttcattgatttctgctctaatttttattattctttttattctgcttactttggatttaatttgttcttttttagttttctacagtagaagcttggcttattgattttagatcttcttttctaatagatacattcaatgctatgagtttctttctaagcactgcttttgctgcatcccataaattttgaccagttgtattttcatttaaatgtagtccaaaatattttttcattctcttgaggcttctttaacctatgtgttatttagaagtgggctgttttatctccaaatattttggtattttccagctatctttctgttagagatttctagtctaattccattatgatctgagagagtatattgtatgatatctattgtcttaaatttgttaaggtgtgttttatggtccagcatatggtctattttggtgaatgttccatatgagcttgagaaggatctgttgttgttggatgatatattctatacatattaatttaatccaattgattaatagtgctattcagttcaactatgtccttactattttctgcctgctggctctgtcagtggttgatagaggaatattaaagtctccaactatagtagtgaattggtctatttctccttgcagtttttttatgtttttgttttgttttttgagatggagtctcactctgtcgcccaggctggagtgcaatggtgccatctctcctcactacaacctcaccctcctgggttcaagccattctcctgcctcagcctccaaagtagctgagattacaggcatgcgccacgatgcccagctaatttttgtatttttagtagagatggggtttcaccatgttggccacgctggtctcgaacacctgacctcaggtgatccacccacctcagcctcccaaagtgctgggattacaggcatgagccaccacacctggtcttgcccttctttatccccgataattttacttgctctgaaatctgctttgtctgaaattaatacaattgctcaagcttttttttttataatcagggttaacacgattatctttctctgccctttacttttaatctataagtctgtttatatttaaagtgggattcttatagacagcatatacttgggtcttggtttttgatccattctctgacaatccctttctttagttggtgtactgagattatttatacataaaatgattattgatatagttgggttaatgtttaccatatttgttgctggtttctctttgatgtccttgttctttgttcctatttttatcttccactctttttctgccttctgcagttttgattgagcatttaatatgattccagtttatctcctttgttagcatattaattttgcttcctttttactttttaaaaaaggtttgttctagaatttgcatttctaactaattcaagtccacttttaaataacactatatctcttcatgggtagcgcaggtactttataaaagggtattcccaatgtctccctcccatctctttgacattgctgtaattcatttagcttatccataagctatgattatccaacatattgttgctattgttatcctaaacaaacccttatcttttaggtcagttaggaatttaaaaagaaggattttattttttattttttatttttattttttttgagacggagccttgctctgtcacccaggctggagtgcagtggtgcgatctcgtctcactgcaacctccacctcctagcgtcaagtgattctcctgcctcagccttcccagtagctgggattacaggcacgtgccatcatgcctggctaatttttaatagagacggggtttcaccatgttggccaggctggtctcgaactcctgacttcatgatccacccacctcagcctcccaaagtgctgggattacaggcgtgagccaccaggtttggcctattttttctttatttattgcttcttgaatgctcttcctttatgtaaatccaagtttctgacctatgtcgttttccttccctctgaagaacctcctttaacattttgaggggctggacagggtggctcatgcctataatcccagcactttggtagcctaaggcaggagaatctcttgaggccaggagtttgagatcagcctgggcaagatagtgatactccatctttaaaaaaaaattgttttttaattagctgggaggctgaggcaggaggatcacttgagcccagcagtgcaaggttatagtgagctatgatggcaccactgcactccagcctaggcaacagagtccctgtttctaaatgaaaataaaataaaactttttttgcaaggcaggtctactgacaacaaattatctccgtttttgtttgtctgagaaagtctatcttcctcacttttgaagaatacttttgatggatacagaattctgtccttttttttttttccgtcagcactttaaatatatcactctactctcttaacttgcacagtttctggagcaaaatctagtgtaattcttatctttataccaacaggtaaggtgagttttttcctccagcttttttcaagattttatctttgtctttggttttctgcagtgtgaatacgatatgcctaggtggagatttttggcatttatcctgcttgatgttctctgggctttctcgatgtgtggtttggtgtttgtcattaatattagaaaattcttagcaattattaattcaaatatttcttctgttcctttctctgtttgccttctggcattcccattacacatatgttactccttttgaaattgtcccacagtttggggatattttgttccatctctgaaatttcttttctttttgctttcagtttgggaagtttctattgacatatcctccgcccactgactctttccttgactgtgaccagtctactaatgagcccatcaaaggtgttctttacttctattatagtgtttttggtttttaccatttcttttttattgtttcttagagtttcaatctctttgattacattactcatctgttcttgcatgttgtccattttatccattagatctgttaacatattaatcagttatttttattttattttgttttcttcagatggagtctcgctcttgtcgcttaggctggagtgcactggtgtgatctcagctcactgcaacctccacctcccgggttcaagcgattctcttgccttagccttccaagtagctggaattacagacatgcaccaccacgcccagctaatttttgtatttttagtacagatggggtttcaccaccttggccagtctggtctccaactcctgacctcacagtgaaaatttggtagggctcctggaggtaaaactgatgaaagtgcgcccccaccaaggcagtcattctcacccagaccagaagctttcagaataggtggcctttggacctagagggagaagagatttctttccttagccattgcaaggtttgtggatgagaccccaataacaaaagacagattaacaagataaacgcatccaattttatttaatgtaagttttagggaacacaagagccttcagaaacgaagacccaaatatacagggaaaactgtatttttatggagagttgtgcagaagtatgatcggaggacaaaagggtatgatgtcatggtaatcaaccagggggaagtagcaaggcctgtttgttccgattcctcttggcctctctgtgtgactttcctttccttgggtatagggcaggacacctgtcacaggaggtcttcaagggagacgggagggagaaggccagagagtgaccttcctgcttctgcagttttcttagtttccttcagcttaaaatactcaacatgccaaggtgccatactttggggtgtcctgttctgagccccgcagagctcacaagctctcggaatcatcttggacgtctgatttctcacggccggggacattttcctgggcctgaggccgttggaaccagaactgtccattttcccgccccggcaggtgacaggctgggaaggagatcctcaagcaagcgggctctcaaagccgaggggaccccaggcaggcgcggagctcagcgaagccagaaggagcgcgccgggggcagcccaagcccggggtctccccggaggaagcaaacagggcgcaggagacacagagaagagctgggggagcaggagcggggcgaggcagagaggacctgcgagggcaggagaaagcgcgacgagagggcctccttccaggagcggacagcagccccaaagagggaaaaggagattccgaggagggaggagaagtcgaagcggcagaagaaacccaggtgtgttgtggctccgattctgggcattcgctccgcgcgctcccgctccttcgcggcccttccccttcccccgtgagggactgatgcccccctccccggggagaggcagcccgtgccctcgctctggcttccgtgcctcccagcccttaccactgccccactctgcggtgggttcttcatcccagaaccgggatgaagatcgcgggtccgcgcgggggagtggccgcgggctctccactccagcgcctcgtggcacccggtgaggcggggcgcgggtggagaggtggcggggcgcgggtggagaggtgacagggcagcgggtgggacacgatcccgcgtcccctgaactccagctggtgactcaccccggctctcgaagaggaggagctgagcgacatgaacaaaatcggactcaggaaccatctgagggcttaagcacacctcgttccggcttccggatctgggccagtttcctctgctggaaatgtggcactggtccaggagaccttcaaggatgctaccagctctgaaattctggagcttggaggttttatttgttttgcctcctttgttccattaccattggcaccaactagcacgtgtgggttagtggacagggccagcttatggcatcagaaagtgaagatttggggttcatgtttttgttatcaattttaataggtgtctctctctttgcctccctttttcagtcattgaggataacagatgccttattcgttgctcatattgttttaagaattctttgtgatagaataggaattcttttgcaacagttgggaatattaggattatggtgaagagttgatgttctttcccggtggtttgtagcaaatcctttttgcccacagcctcagttgggtgctccatcttcctctccacctttacagagaggcttttaaacaagggcactgatttttttcctgtcgccatgccaaccatcctggcttggttacagcctttgtctactgtctggttgctcccagacatgaactaaagaggtaaagggtgcatcgtgcccttggccatttaaaaataacgtgaatgcaccgttgatgggccctgggtgccctgaactttagagggagcctgtaccatcccaatgggccacagactcatttatgtcattttcagctgagggccatgccaaggcattagagagatgaaaacattcagttcccgttgcctagatactgacagtgtggcagaggagataacacataggcattggtaatcctaagacaaggcagaaagcaatatgcatgcaagacaggacttgatggagcgctgaattccccgggtgctgggccatcagggttcctccatggagaaggtgaacatcccagtgaggctttgaataacaggtggaatctaaataagcaatgactgaatgtccaacaccccaaactgtgggaacaccctacgcagagactcaaaggcagatatcatcaattgggtgtgcatgaagtatggcaaaaaaaaaaaaaatatctctgtgttctaggcttttcaaccttcaagggcatcctaaaacttcttctttgctccccaggagttaatcagaagctaaaacacccagaggctgctgcaaacctgtctctaaaacctgcagtaacccaagcccacaccctaatactaccatttatgaaacacactcaggctgcccagccataacccttccttagtcctttcctttacctacccgattgggcgctgtctcactcagctgagagtcactatttttcatcactaaaggagtcagaggccgggcgtggtggctcacgcctgtaatcccagcactttgggaggccgaggtgggtggatcgcgaggtcaggagatcgagatcatcctggctaacatggtgaaaccccatttctactaaaaatacaaaaaattagccaggcgtggtggcgggtgcctgtagtgccagctactccggaggctaaggtgggagaatggcgtgaacccaggaggtggagcttgcagtgagccgagattgcgccactgcactccagcctgggccacagagcaagactccatctcaaaaaaaaaaaaaaaaatggagtcagaataggctggaggctgtagggagcacacacagacacttggattttgtgacaactgagcacatagtattatctgggagatggggagctccccagctggaaattctccacagccctgctgtccaatatgacagccactagctgcatgtggctgctgagcacttgaaatgtggccagtgtgactgagcaactgaattcctcatttaattgtaactcagtgttaatgccactgagttgacataagagttggtgaatttacttaatttggacagatgtagttttgaaactgatttgatttgactttgaagccaaaacagttcttctacaaaaagacaaactactgttgtcaatgcagatacaaatatcaaaggaaaaccatattctgctacttgattcagttcttgggaatcttttaagtatgtctaaaacaatttgggcaaatctacttttttcacctataaacttatgaaatataaatacaaattaaatatatctgatgaaagtttatcatctgaatagccttgcagtatgagtacaaaatgaacagtgacctttgaagacagtattttttaaaggactgaaatatctctaataattttatattgattacaggttaaattccagtttttaatatatttgagtaaataaactgtattattaaaattgctttaatccattgctttttaccacttcaacgtggctactagaaaaatttgcattacagtaagtggcttgtgtcctatttctgttggggaacactgagctggcatgtggtttgtgggaggactcagagaaatggaggatggggaggcagccctccagggccctgggctacagggtagaattttggcctccgctgccaggcaatgggagtcactaatggcttctgagcaggggaaggggtgccatcttccatgggcccctcctcattccacagcacctgaggacaccacctcctttccaacttccctctgcctccgccctggctctgcctccaggtcatcctccttggcctccagtgcctctggtggggagtccctgtccgaggaggaactggcccagatcctggagcaggtggaagaaaaaaagaagctcattgccaccatgcggagcaagccctggcccatggcgaagaagctgacagagctcaggtgagcaggctgcgggtcagccagggccttccgatgtccacagctccttctgatgggaatgggagccctccctccacatttccccaaaggggcttgatgtgagggggctgctccagcgaggacagcactcagggagccccatgagagccaaggcggccgtgctgttcgccagcaccacagggcctagagggggagccatggaagactcggaggactcccgacctgtgcccatgccttcccttgcctggctgccccttttatcccatgccacacttcatctcgtggcttctgtgcctccctcacagcccaacagagacatgccttctcctggaagctttctagaccccttctcctcaagagcagctctctctcatgttcctggagcacccagtgtctctccatgtgtacacactctcgcttgcgtgatttgcacggtgagtgggagagggtctgcctgagccactgtcacatccccattgcctggcaccaggccaagctggcccccatgcaacatgaatatcactctgtgaatggcaacaggcctcctgcccatgccactcgactcctgttttctactcagccacttctttggtttccatgcaaaaggctgatgcacggagcatttgatgattctggggtctttgctgcagttttaaaataacagtagactcacacctgtaatcccagcactttgggaggccaaggcaggtggatcacttgaggtcaggagtttgagaccagcctggacaacatggtgaaaccccgtctctactaaaaagacaaaaattagccgggggtggttgcgggcacctgtagtcccagttactcgggaggctgaggcaggagaatagcttgaacccaggagacagaggttgtagtgagccgagatcatgccactgaactccagcctgggcaacagagggagactctgtatcaaaaaaaaaagaaagaaaagaaaagaaataacagcagtagtcatattacatactttttgagtttctgctaaaaagttcctatccaacatgaccgttttccccaaggtccctctgtttttttgccacagcgttgggagtggcactccccccgtttcctctgtaggaagcccatgctccctggctcctctcatacatgagcttcctcattgctcgttcaaactcctcaccctttattaagcacagcaatttggcagccatgtttttgcagtatttaccccaacaggcacagtaaagatctagctacaccaacactgggccgaccccgacaaggaaaacagagcttaccccacggccctgcaaattattacgtcatctcctatatggctgcaagaagaaacacctcctcgtagtgcctccaggcctatgctttaggccagtgctgctgagcaccagagctttctgcaatgatggaaatcagtcaaaatctgcactgtgtaacatatagccactaccacgtgtggttactgagtgcttaaaacagattagtgtaaccgaaaaactgatttttttgttttagcttttatttaaacttaaatttatgtatagcatagtgactataattaataacaatatattggatacctgaaaattgctaagaatagattataagtgttctcaccacatacaagaaacaagtatgggaggtaatgcgtatgttaattaactcgatttgacaattcataatgtatgcatatatcaaaacagcatgtacaccataaatatatacaatttatttttaagagacagagtcttgctctgtcacccacgctggagtccagtccaccattttaactcactgtggccttgaattcctgggctcaagtgatccgcctgccacaacctctccagtggctgggactacaggcatatgccaccatacctggctaatttttaaatttttttgtggatacagggtctcgctatgttgcccaggctgatctcgaactcctggactcaagcgatcctcccacctcagcttccccaagtattgtgattacaggtatgggccaccacacctggcccatttgtcaattaaataataaaataacaaattaattttaaaaatttaaatagtcccatgtggtgagtggcgacagtgtggaagctagactcagctctggactgtcttccttctcagcctcctcttttttttttttttttttgagatggagtatcgctctgtcgcccaggatggagtgcagtggcacaatctcggctcactgcaacctccgcctcccaggttcaagcgattctcctgcctcagcctgccgagtagctgggactacaggcgcccaccaccgtgcccagctaattttctgtatttttagtacagacggggtttcaccgtgttagccaggatggtctcaatctcctgacctcatgatccgcccgcctcggcctcccaaagtgctgagattacaggcatgagccaccgcgcccggccctcagcctcctctttttgaatcctttctccctgctccctccaagctgggctccttctcctgccagcagggcagaacagccatctgtcactctaatagaacctcactcccactcaggtgtcaccagaacacatcttttattaacagtggaaaaagtgcagccttgatgcctatggaaatgagatctccagctggctggaagtctcagggaccgtgacaatccctgagggctcctcagctgccagaggagaaatctgacatctccttcctgcctctgaggggcagagttcctggggctggcaggataggaagaagctaaggcctgagaagccaaggagacctatgcctctctcactggagtgggcctccccagcaaacagtgggtctcctttccctggacctccctcctgtctcttcctagcttcttcccttccccaaggctccttatcctggactcagatttaagtctctccagcctctagtctccacccgagctggtgcctctgcctagaagatctgtgctttctgccacctctccttgctaactcctacacaccttgtaagactcgggccaagtgcctcctctgcagggaggtccccattgcccctccccacaagcaggctgattgatttactgtccctctcattccaaggcactgtccactctcttgactggatgctgttcttgttttcagagctgtctctttttcatcatttactatcaattcctttttatatacagccagtctttgctgggcatgccctttgtgccaggcactgttctgagtgtggtatgtataacaattcactgaatcctcacaatcaccctgtgatgtcggtactgccattattgtcaccattttactgatgagaagactgaggccacacagcaagttaagtggcgcagccaggatttggactcaggaattctggctccagagcctgcactgtttttttgtttgttgtagttgttgttttagagacaaggtctcgctatgttgccgggactggtctcgaactcctgggctcaagtgatattcccaccttggcctcccaaagtgctgggattacagagcctgctctcttaatttgtaatcgtctctccagaattaccagacattcgagaacgcaacccctttgctaccagtatgatttcttcttctgaaaataaagtctccagttgcagacggcatccccatactacatcctctcttttagaaatagtagtgtgggggccccattctctggcccagtcaggcactggctgacctgagcatggttactgtagactatctaaaaaggcttgctagtgctgggtgtggtggctcacacctataatcccagcactttgggaggctgaggcgggcagatcacttgaggtcaagagttcaagaccagcctggtcaacatggtggaacctcatctctactaaaaatacaaaagttagccgggcgtggtggtgtgtgcctgtaatcccagctgcttggtggctgaggtaggagaattttttgaaccaggaagtggaggttgcagtgagccgagatcatgccgctgcactccagccttggtgacaaagtgagactctgtctccaaaaaacatatgaaaacaaaaggctggctggacataaaaagcaacagcagtgagttggggcaaacctgaattcacacctctgccacatctggagactttggttggctacccaatccctctcagggtcacttccttcccttaacctctctgagcctaataattctcacttgtaaaatgggaataataacatctacctcacagggttgttcaaacaatttcaaaatatttttattaagtgcccagcatataatatgcaattaaaaaatagcgattactgttattattaaagcttgaacatcttttatgcctgacactatgctgagccctgagagatgaggttggggaacaaagatgaatcagagaagcatgtggacatcatcaataatgatacacagtaggatgtgaagttggcataacagcttctagtgcccatgaatcagggatatttgctttaatcatagaattaatcaggtctgtctctcagctttgtccaaagcctgatatcttagaaaactacccaaactgctttctttcttcagagtgattagaggacttctgcttctaggtagatggagtagagacgcttttccctattcttcccactaagtacaatgaaaaccctgaatgccatatttaaagcaaatataagaagatttgaaaaggtagaaagaagaaggcaaactggctaagaacctcaggaccaaagggatgaccagggcattgagttccttggattttcttttttaccttctatatcccagactggctattggaaaagctggcaaccccaaaactccaatggaggcagccaaaaaaaatgccccaagaaaaatctgctatttctggccaaaggaccagggaagaaacagactggcaagacagaaaacttttggacaataactgttctccagccaaataccacagacaaaacaacagcccccattgccaaccctggcagcaaaggcaagtggggaagcctggatacccacctttgccaggccaaagcaaggtgccccaatacccctaaccagggtgtgccagaggaggctgagtgggaagcaggaattttcatccccagcaggtagtaatgatccctccttttccccatggtttcggtgaggaccatgtggggagtctagactctcaccatgacttggaagtaaccaggcttgagtggaggcctgaaccccatccctgctcagcggtaacaaggagcttctcctcagcctcaggtgtcaaaggaggccaaatgaagaacctggactttcacccccacctggaagtaatcaggcaacattacctacaactaccatagcaatgtcagaggaggcctggtaaaacataagatttaaataatacctagagtcttataatatccaaaagtccaggtttcaattaaaaatcgcttgccataccaagaaccaggaagacctcaaactaaatgacaaaagatgatcaacaggttttaacaccaagatgacagagatgttagaattgtctgacaaaggttttattttatttatttttattttttatttttgtagagacagggtctcactatattgctcaggctggtctcgaactcttggctcaagcaatcctcccacctcagcctcgcaagacactgggatcacagacatgagccacaccttgcccgacaaaggttttaaagcaaccatcataaaaatgcttcaatgagcaattgtgaacacatgaaacaaatgagaaaaacagtctcagaaaaaaaatagaagctataaagaggaacaactggaaattttagaagtaaaaaaatacaataactgaaatttttaaaactcagtgagtgggctcaacaacagaatgaagagaacagagtaaaaactcagtgaacttggagatagaacaagagaaattacccaatctaaactatagagagaaaatagcctggaagaaaatgcacagaacttcaaggatgtgtgggactataataaaagacataacattagtatcgttggaattccagaaaaagaggagaaaaaggatgagactgaaaaagtattcaaagaaattatggctaaaactgtctcagatttggcaaaacttacaaattcaagaagcaaaacaaatcccaagcaggataaacccaaagcaaagaaattcattccaagacacatcatagtcaaacttctaaaaacttgtaggcagtcagacagaaacaaaacatcacctacagggaaaaaaacacaattataatgacaagaaacttctcatcagaaaccatgaagggcatgccctttgtgcctttgttattatttatatatcttcacagagttcaaaaaaagtttgctgtgcccatggaaattcataaaccaggtggactcttcacagtgactggtcttcatagtttgcaactagcctttggtagggtcccctgttctcttgggggtttgctggatgtctggacacagagtctgaacagagagaagagaagcgtttgctgctgggctcaatgactcaggcgcaagagctgcccctacttttgagaattgttaactgaagctgctaaatcttaaaacctggcacatttaagctcatagaactccaagtgcttttgagtatttgcccacttgtaaaatacaggaagaagacaaaaatatgaatattgtgaaaccattctttgttgttgcagtggtattggtgttcactgataagtcactggcaggacatctcctgccaagggggggaacagggagaagatcccattgaggaggacatacagcccagttcttgaccctgggtttaggagtaggacaggcagcctcactagcattgagacactgagacatcccaataaagccagcctcaaggttaggatgcaacttcacacgtatcaactgtccacacttgtaccttggaggcagcaggaacagtggggtaggcattttgtaggagcagtggtgactgtagcaatagcagccagacacacacagctccacaacaccttcttccatctgccctaagacggacttcattcttcactcgcatgattgggtttatctagtggttgctgataaactagctttctgaggtgtgggacaggaggaggagccctggtcatagtatttgctgatttccgtggtctaaatactcccaccatggccaactcaaagctactaacagtttaacaactggttggccaagttcctgaagatttaacaatctgttctcaaaggctgtcctcaccaggtccagcaaccactgcagaatatttaatagacaaattgattcatttgtttctcatccaactttaacagggtgctcattcactcactcagtcaacatccatgtgttccacaaatacctatccaatgatgcctgacttacaatggttcaacttataatttttcagctttacagtgggtttattggatatactgcatcataagttgaggagcatatgggcttatgatggttcaacttacaattttttacttaatggcctttttggggtattaagtacattttcaacttaacgatgttttcaacttacaataagtttattggaacataaccccttgtacatcaaggagcatctgtattaattttatattgctattgcaacaaattaccacaggttaagaatttaaaataccactcgttaattagtgcacagttctgtaggtcagaagtccagcatggcatggctggattctctgttcagggtctcatcacaccaaaattatggtatcagtagggctgcagttctcacccagggctaaggttctcttctgagctcactgattgttggctgaattcacttccttcttatgctttttgtgtagcccctccagaggggccccagacacagagagtcaagaatattcctgctccacgtttgataaaatctaatattccttcatgataaaagcctccaacaaactaggcattgaaggaacatacctcaaaataataaaagttatctatgagaaactcatagtgaaattcatactgaatgggcaaaaactggaagaatttcccttaagaactggaacaagacaagaatgcccattctcacttctcctattcaacatagtactggaagtcttaatcagagcaatcaggcaagaggagaaaaatgaaaggcaggaaagaaggaaataaaagtaggaaaagaagtcaaagtatctctctttgctgattatatgattctctacctagaaaaccctaaagactctgccaaaaggctcctggaattgataaaagacttcagcaaagtttcaagatacaaaatcaatgtacaaatgtacaaaaatcaagagcatttcttgatctagtaacattcaagcagagaaccaaatcaataatacaatcccatttacaatagtcacaaaaataaaataaaataaaataccttggaattcatctaaccaaggaggtgaaagatctctacaaggagaactacaatacaatgactaaagaaatcataggtaataccaaaaaaaaatccatgctcatggattggaagaatcaatatcattaaaatgcccatactactgaaagcaatctacagattcaatgctatttctaccaaactaccaatgtcatttttcacagaaatagaaaaaaagattctaaaattcacaggaaccaaaaatgagcccaaacagccaaagctatcctaaacaaaaagaataaagccagaggcatcacattactcaacttcaaactatactatgaggctacagtaacgaaaacagcacagtactggtacaaaaacagacacatagaccaatggaactgaatagagaatgcagaaataaagctgcccacctacaaccatctgatcttcaataaaatcaacaaaaaacaagcaatggggaaggactccctattcaataaatggtgctgggataactggctagacatatgcagaagagtgaaactggacccccgcctctcaccatacacaaaaatcagcacaagatggattaaatacttgaatgtaagacctaaaattattaaaatcctagaagaaaacctaggaaatatcattctggatattggccttgggaaagaatttacgactaagtcctcaatagcaactgcaacaaaaacaaaaattgacacatgggacctaatcaaactacaaagctgctgcacaacaaaagaaactatcagcagagtaaacagacaacctacagaatggagaaaatattctcaaactatgcatctgacaaaagtctaatatccaaaatctgtaaagaacttacacaattcaacaagcaaaaaacaaataactccattaaaaagtggacaaagaatatgaacaaacacttctcaaaagaagacatacaagcctccaacaaacatatgagaaaattctcatcatcactaattatcagaaaaatgcaaatcaaaaccacaatgacacaccatcttccaccagtcagaatggctattattaaaaagtcaaaacctaacagatgctggtaagggtgcggaaaaacaaacaaacaaacaaacaaaaaacacttatacattgttggtgggaatgtaaattagttcaaccatcgtggaaagcaatttggagatttcttaagaaacttctcttctgtttttaagggctcatattattttattacactggggccatgcagatgacccagaataatctccttattttaaaatcaataatcttggccgggcatggtggttcacacctgtaatcccagcactttgggaggccgaggcaggtgactgcttgagctcaggaggtcaagagcagcctgagcaacacagtgagaccctatctctaaaaataaataaataaataaaataaaatcagtaatcttaactacattttaaaagtcctttttgccatgtaacatattatattcatgggtggaacaccaccagacgaaggtcacaggggccacagttctgcctaccatgcctgttatgtacctcgcactcttctcagcatttgggaaacttcagtggataaaacagacagaatgtcgtgccttcatggaatttatattttaaccaggggtatacaaagacataagccttcacacatgtgtttgaggcttcataattcagatttcctctggttaggtgctaactgaaatcctgcttttttttttttttctaagcagggaggcccaggaatttgtggagaagtatgaaggtgccttgggaaaggggaaaggcaagcaactatatgcctacaagatgctgatggccaaggtgtgtggggtgggggcagtgaatctgttgggagggcttgctcagctttggaatctggcgaccaacttcggcaactgcccagcttcgccatttgtgtccagctgcccccagaatcctgggtgtgagggccacctgaccattctgatccatctaggcatggaaaccaatcgtatcctgccaatttctccatacttactgtgagggcttcaatacatttgagacttgtcttctctccagtgaatacacttagagaactaatgatgttaaaaccactgggattttattttccaaaccccaaatcaggacaggttgagttggtggagacccagaagggctgtggtgtgatcagggtcacgtggatgataaacagcgatgtccccagacggatgggggcagctctgttttgttgagttgtatcataacctgggcatctgatttaagttagggtaatgtttcatgttggatatttaaagtgagacttactgaagtatccttcctttacccactgatttgaaaaactaccattctcattcacttaattcttgtacagagcctgtttcagggcttttattctgaacaatcatttgatgtcattacctcaatgacatcaaatgcctggtagttctaggttcccctttttacctttggttttttgtttgtttgtttttagaaacagagtctcactctgccactaaggctggagtgcagcgtcaccactccagccttagtggcagccttgaactccttggctcaagagctcactgcagccttgaactcctggcctcaagagatcctccagcctcagcctcagcctcctgagtagctaggactacaggtgcactccaccacaccctgataaaactttgtttttaaaaaataaaaaaatgtcttggctgtcttgcccatgtttctacatgcatttttaaaaatccctttgccaagttccaccatagtgtattgagattttggttggaatttcttttaatcctgtatttaatttgggacttccttatctatacaatatttagttttcacatctaggataccatacatttctcaagcccatattatatccttaagcaaagtttgtcattttctccctatagatcttttccatgttttatttctgcacatttgatagcctagttgcttttgcaaatgcgatcatttttcaattatttaataactagttattggtagtatgtaagaaagctacaaatttttgtgctaattttatatctggttctcttatggtactctcttattaattcttttttttttcttttcttttctttttttttttttttttgagacggagtctcactctgttgcccaagctggaatgcggtggcgcgacctcggctcactgcgagctctgcctcccgggttcacgccattctcctgcctcagcctcccgagtacctgggactacaggcgcccgccaccacgcccggctaattttttgtgtttttagtagagacggggtttcaccgtgttagccaggatggtctcgatctcctgacctcgtgatccgcccgcctcggcctcccaaagtgctgggattacaggcgtgagccaccacgcccggcctctctcttattaattctaatctttttcatctgattatgttcataaagatgtttttgttgggttctcctaaatgtgacatctcattccaattctaaaatgtgaactagccatcctagaacagcatcaattgataatggtgatcatagctctccttatctttgcatcactttaatgagaatgactctaatgactttcacactaagctgatgggagttgatggcttgaaatagattttctttgtcaccgtaaaaattattgtctagttgttgtttagtaagacttccatttcattggaaatagataattaggttttattaaacaccttttcctttatgttattaatttttttttatttctgggataacctcagtcacggtacattacttttaattccacagacacgtttgattttccgatattttatttatgatttttacatacattttcataagattgatatgaatttgtgtgtgtttgtacacaagtgtatgcatgtgcagtatcttggcagattttaacattaggactgcacttgcattataattgtaaatgaatagcgttacctcctctttatgctgtaaatcagttttgggagcatgataatacactttttgttaattttaaagatgataacctttcaatagtagagatcgagagccatttttatagaataccttgaaatttttttcaagtattcagtttattgatgtactcaagttttaactttttcttgagaccatttcaataattcatattcttcctgaaacttgatcatttcattaaaattttcatatgtgttaacagaaagtcgcatatggtagccccataaatttgtaattactttttatatctgttgggtttgaatctttcttattcctttgtttttttgtttttttttctctgtcgcccaggctagagtgcagcagcatgatctcggctcactacaacctctgcctcccaggttcaagcaattctcctgcctcagcctcccaagtagctgggattatgggcatgcgccaccatacccggctaatttttgtatttttagtagatgcgatgtttcaccatgttggccaggctggtctcgaaatcctgacctcaggtgatcctcctgcctcagcctcccaaagtgctgggattacaggagtaagccaccatgcccggactcaatctttcttattcctaatattattttttctcattttccagttatacttgccagacaactctctataggtcattttattaattttgtctagagactatttaccacttaccaactgcacactcacatcttattttttccaatgaagaatgtgctgttcaagtatattttttttctagatttttactgtgacaaacaatgcttcaacaaacaccttttacatttatcttggatccatgtgttttttaaaatcacaataagacagtccctcaaatagtactgctagttcaaaagtgtgcatattttaactttaacttttactacacatttttcaaactattttccccaatctatagcaactcacactcaaaggaacaaagtcggagaatggcttatcttcactagttatgaatgttaccgtctttttaactttgtgctaatctattgggtaaaaaaataggttattattctttctttaatttgtattcactgcttttttattgcagtaagaacacttgagatttagctttttaactaattaagtacacaataccatgttgttaagtgtaaacattgtgttgtacagcaggtctctagacaaatacatctttgataaatgattctgttaaaccatgtttctgttcacatagttctagcttcccccttaggaaaaggattgcctccccccacccccatcccccatatttacttttccacgttattttttagctctttgcttctttctctttgcaatctcagaaatttatcaggtttattctcaatatcatggaatccattttcctctgtgtcaattatagtctttattttgtctaatgtttttttcattcaattactaagctcttagcttccttgtaatccttccatatctcatctgtattcttttcaaattgatatcctttactttagaagccatatttattgcatcctattaggaatgctgacctgctttctagaatttatgtatgtatcttggaggaaatgttttccacaaatatcaaagaatggtgtccctttttccctgttctgcaataatatttcccaggcctcactggttgttttcattttagtcacccagatcctgattttattgacaggacatgtagcttgcctgtgtcttgctccaccatgacttgaaacttttttcctatgtatagctggagggcaagacagcatgacaactaacaacccatcctaggaccagcagcaaccacctcacacaggcctgagaaaggggcttggaatcttctgcccatgccccagtccagttttctgactctgtcaaccaatgaaggataagagaatccatgccagagcatctcccaggcctctctctgcctctgctccagttctggggcctcacttttcagtccgagatatccacagccttgaggggctgtcaggtggttgccaaggaaccgaccggcaggctgtgcctccagggacctcacttggcaatgttcattacccctgctggtcctcagccttgcaagcctatattttatactgattttatcagcaccctgacaggggatccatctctcgagggaggactcgcattaataaagcttatgagactgctacatgaaaccagatgctggattattaacttacaagaagaaataagtgatgcaagatggaaaatttgaagtccacagcagtcatgccttttatttttgatagctgagttagtaatacgagaagctaaaccatcatcccaattcctatctgtgaatttgcagtgaaagtcactgccatagaaaccaaagtactcaaggcaaatgctctctttataggcagacctacctaggaagccaaatagtcaaagagtatttttgggtttggggtttcttcttggttttttttttttgtttttttttttttgagatggagtctcgctctgtcaccctggctggagtgcagtggtgtgatcttggctcactgcaacctccgcctcctgggttaagtgactcccctgcctcagcctcctgaatagctgggattacaggtgcctgccaccacgcccagctaagtattgtatttttagtagagacagggtttgaccatgttggccaggctggtcttgaactcctgccctcaggtgatccacctgcctcgatctcccaaagtgctgagattacaggcgtgagcaaccgtccccagcctgtatttgtttttagtagagacagggtttcactatgttagccaggctggtttcgaactcatgacctcaagtgatccacccacctcagcctcccaaaaagctgggattacaggcatgagccaccacgcccagcccaaagagtatttttgaacacagtctcagagctagggagggcggatgaagcaatgagactgggctgcccagtgtctgttttctgccaatcaccatatccttcctatctttgccactgttatcaaccagtctgctgatgggcttctcctctcttttgcatctgggaccatctccctcttctgacagctggttcccttctttatacaatcattcaatcaggagatggtcaaaactatatctggaaaaccaggtctggaagcctgtctgattccttcacaaaatttttcccgttttgatggatggtggctcacacctgaaatcctaacactttgggaggctgaaagcaggcggatcacttgagcccaggagtttgagaccagcctgggccgcatggtgagaccctgtctctacaaaaaataaaaaaaattagccgaatgtggtggctactcaggaggctgaggcaggaagatcacttgagcccaggaggtcaaggctgcagtgagccatgtttgcgccacctgcactcggcctgggcagcagagtgagaccatgtctgaaaagaaacgtttccctttcatcttctgctgactttattttttgccccttcttttcacaggtgcggactttagtgactttacaggggaatatctcatgtcctccatgaacaagttctgaggagaccttttaataataggaaccgggccaggcacagtggctcaagtttgtaatcccaacactttgggaggtcgaggcgggcagatcacttgagatcaggagttcaaggcctgcctggccaacatggtgaaacccatctctactaaaaatagaaaaattggccaggcgtggtggtgcgtgcttgtaatcccagctactcaggaggctgaggcaggagaatagcttgaaccccggaggtggaggttgcagtgaaccgagattgcgctactgcactccagcctgggcaacagagtgagactccatctcaaaataacaataataataataatgggaactgatcttaggatctgctctctactacctcttatgctttctatgagtatttctacctcagctttctatgagtatctgttttattccaaatggatttgtttccacaatgtggggctggtggagagcagtcccttggagagttgacaaaacaacacccagccatagaaagacggctgatcaggtttctgtttggtacatagtctgggtgtctagctgggaacagatcacaggagggggcaacatgcctttctgactcttttcagaaaagcgaggctgttgttcccccaggagaagaatgttcagctatgggttgagatctccttatcagttgcaccacccctgcaattttgcgacagttcctatcagagagaggcacttggctgtctgccagacgtgggtctgagagtagccagagttccttctacctttgaatttttgttttaagttgaagaaagtcatatcagaggttgctaactcaatcggaccctccaaatcagaaatcgtacagagaatttctcactttatctacaaactgtccaaaccagaaattttatcagcacagtaaggggtggccctcacttgtctctcactccaggcctgacgttggggaagtaaaggtttgaacacctgcctctggcagcctgggctcaaggacagcaggagctggggactgcaagacagcagcttcacccatgctgactcatgctgacctgtcggcctcctcgtgcccctcatcatgcccctttgtgctccaggttgacatgttaaggaactgagagttttacgtcttttatttcagaaatgggtcaaatttaagagagactttgataatttcaagactcaatgtatcccctgggaaatgaagatcaaggacattgaaagtgagtatgctggtgtcactgtttttttaattggtttcctaaagcgtttcccaagagcttggattgtttccttggccctctgaatagattatttcattggttctgttgtattaggaaaaaagaatgagttttgaacttgtcaggccaagatttattttttatttatttatttatttatttatttatttatttatttatttttatttatttttgagacagagtctcgctctgttgcccaggctggagtgcagtggtgtgatcttggctcactgcaaccttcacctcctaggttcaagcgattcttctgtctcaacctcctgagtagctgggattacaggtctgggccaccacacctggctaatttttttgtatatttaatagagacagggtttcatcatgttggccaggctggtctcgaactcctgacctcaagtgatccacccaccttagcctcccaaagtgctgggattacagacgtgagccaccgcactcatcccagaccaagatttaaattctgctttttcactttctgactgtgggcacttaggcaagttagttaaccccaaagagcctcaggttatttatccaggaaaagaaagggagatccaggtgtcattcaacagactgatgtgaaaattgaatccaccacacacataaagtgctcaatagtgtccattttttccttctgcagcactcatacccaccgtcttttctctctctaggtcactttggttcttcagtggcatcgtatttcatctttctccgatggatgtatggagttaaccttgtcctttttggcttaatatttggtctagtcataatcccagaggtaagaaaagaacttcctaaatctttggatagagttaaggcttatgaccaccgtcatcaattatcaaccaaatacttcctgttttacaaagaatcagtcattcatttaaaatgctattaggctggtgcaaaagtaattgttttgcattaaaagtaattttaattttttgccattaaaagtaatttataaattactgccatgaaaagtaaatttataaaattaaaagtaatggcaaaaactacaattacttttgcaccaacctacgacctaatgtactcacatcaattacccagatagttaaatacaaagaatggaaccaaaatactttgttccttaattagtaggtgaatcttacatttttctacttctcattttaccttaagatcagtggagaattaatgtttcaatgagtttttttcttttactctcagaaaaaagagagggatagaatacattatatcattatttatcaccaaaaaaacttggatttgactatcactcctcactattctcccatatataatttttaaggaggttttttttagaaacagggtctcactctgttgcccaggttggagggcagtgatgtgatcgtggttcagtgcagccttgaactcctgggctcaagtagctctcccacctcagcctcccaaagtgttgggattacaggcataacccaccatacctggccccagatataatcttattatggacataaatagattcttatctacagatgattaattgagaaacaaaaaaggggtaatgagcaatttgtgcaaagtcacacaataagatcattgtgaattggatctcaggtccccagagtgatggcttagggtcttttccaaggagcctgtggctcactaagcactgagcacagcaattgctacaattgctacagtcctgactgaaatccttgatgctggtgctgggtacacaagtgggtctacttcaacagctttcagaggaacagtatgtgtgcatttagtattttcttcctcacaggtgtattaattggttctttgatgacttactgactcctattttgttataaatggttctgtgagcatattggagtcaattctatctgcagttacattttctgcacagccactttcaggacattaaaaacctttcacataatgtgaattaaatcagatttattggaggaggttgaccatgcattataatagcctttggtagcaaaggagtgttacattattcataaaattgttgaattcttttctatattactcaaaatgtgtgcttacaaatatgtcattaactagcctttgtactctttcataaacacacctagaaatcaagggttctgagtccactgagccctacatatattcttatgccaatatcactctctgacccagaagttagcattttaaacgtcactgtcaagcgtacacaaacactcttacaccaagtctggttctccccagggggaaaatattgtcaaaagctaataggaagtctcatttatctcctccatagtcaggtaaatatgaaatgttttcctcggtagtcaatggggaaatttaccttcacaaagctcttggctttcttcttggaagcttttattccatgagaagagagcacatttaaatgccacaggcctatgagacatctctgaaattttgctgtgcagtggtccataaaaggcaggtttgggggaagttgagcaattttaaggacactcggttgctttttaaaagagaacattaaatttggtataatttatgtaagtttttaatatttttatgagggaacatttattttaaacaataaaaacttagtgattggtgcattccaatgaagcagccaagatctgaaccattcgtgctagagaaccttgatttgattggcaggtgattgggaaaaccatactggagtgggttgagagtaagagagagagagagatgctttgctggaaagaggagccttggcttgggaagaaggagaagggaagaagggaaataggggagaagggaagaggcttagaccaggtagcagcctgttgcagtaggtcagtgctagatccgggtaatatcaatgggaatggattaaaagagaggaatcagagtgaagtgcacggacaagtcttgatgacaggttggataacagcaattagggtgtggggtgtctcaagatgccttcttatttaggatgatgggaaattggccatatgggaatcagacacatccaaattcattgcacatctaaaggaagtgtcctgttggtcaaagacacagagaacttcagggctcaagggttttcagcataagctaaggttcagagatatccccacgacccatggatgttttaaaatgaagcatagtgaaccagagggtccagggataagaatagtagaagtgctcaaacatgactttttaaaaaaattatttatatatatatagagagagagacagagcctcattctatctcctgggttggagtgcagtggcacagtcttggctcgctgcagcctccacctcctgggttccagcaattctcgtgcctcagcctcccaagtagctgggattacaggcacgcaccaccagacccggctagtttttgtatttttagtagagatggggtttcgccatgttggccaggctggtctcaaactcctgaccttaagcgatctgctcgcctcagcctcccaaagtgttgggattacaggcatgagccaccatccctggccttgaacgcaactttaacgaaacttctccttatattcattttccttttgccacaaactctcaataccactttatgaaattaaacagctctgaatgtaagaatgagccttgtttatctttaattgccattgcctgcacaacccaggatgtctacgtgatccctgaggaaccctcagttatgctgcaggagctggctggcaaggccccactggatgacaagtttatgtacttctcttccaacactggatgtatgtgaaaatcacctgggggactttaagaacaccagatcttaggctcacccccagtcaaataaatttgactctgagggtatggtcttgttatctctgttttaaaagcttctgtggaaagcagatttctatgataacctccaatgatccttctctcctggtattcatgtccttatgtaacgcctccctttgaatataggctagacctagagacttgcttttaacaaatagaatatagaatggttaggttatgaaagatagtgatttccatcttgctggcagaattctctgttgattcccttcttggtttgggtgctttaatgaagcagtctgacagattggagatgcccacctggcaaggaactgagtgtggcctttggacaatggccagcaaggaactgaggcccttagtccagcaacccagcaacaaccacataagcactttttttttttttttttgagatggagtcttgctctgtcacccaggctgaagtgcagtggcatgatctcagctcactgcaacctctgccacccaggttcaagcaattctcctgcctcagcctcctgagtagctgggattacaggcatgtgccgccacgccctgctaatttttgtatttttagtagagacgggatttcagcatcttggcctggctggtcttgaatcctgacctcatgatccacctgtcttagcctcccaaagtgctgggattacaggcatgagccaccatgctcagcctcacataagcacattttaaggcagattcttccccagtcaaaccttcaaataagaccaaagcagaaattttggttgcagccttgtgaaagatcctggaagcgaaggacccagctaagccatacccaaaatgctagtcacagaaacagtgagataataattgtgtgtttttttaagcctctaacattttagggtaatttgttatatagcagtagatgactaatgcagctccccaggtgattctattatgcagctagggttgaaaactgctaatgtacattataaggtctttaaggaagctgtgctttaggtttacatagcaagcattcagtctgtaaacctcttatgatacttccccttaaaaataactactaaattatttcagacatatgaaaagatataatgaggccgggcgcggtggctcacgcctgtaatcccagcactttgggaggccgaggcgggcggatcacgaggtcaggagatcgagaccatcccggctaacacggtgaaaccccgtctctactaaaaatacaaaaaattagccgggcgtagtggcgggtgcctgtggtcccagctacttgggaggctgaggcaggagaatggcgtgaacccgggaggcggagcttgcagtgagccgagatcccgccactgcactccagcctgggcgacagagcgagactccgtctcaaaaaaaaaaaaaaaaagaaaagatataatgaatgagcctacttgctcatcaccatgcctaaaaaatgaaatattacacacacactgaagtcctctgattaattttccccaattttattacctacgtaaccctcactatcctgaactttccatttcaactcacattttaaaatgtagtgacttaaatacagtcatctcttattttctaaaatcacagtgtatctaaagatgtatccccttttgcattacagtataatttttttgtctcatttacagcaaagtttgtcttttttagttattttgttcaagaaaaaacttttggctttgctgattctctctgaaatgtctttttttttttaattcagtcttttggggggcacaatttgcatcaagtaaaatttactccttttaggtatacaattcaatgacttttgacaaatgtatgatcaggtaaccaccacacaactgaaatatagaacatttccatcgccccctaaatttctctagtacccacattgcaagcaatctcctctcccagctcccagcccttgacaaccaatgattgatttctgatttctgttcccaaagttttgcccttttcagaatatcatacaaatagaaatatgtagtatgcagttttattgtgtctaacctctttcagttggtacaatgtctttgaaattctttcatgtagtttatcagtcatttgtccctttattgctgaaatggaattgaaaattacaatgggattgtaatattccaccatatgagtatatcatagtttgttatccattcaccagctcatggacatttcagttgtttctatttggaaactattatgaataactctactataaaacattcactttcaggtctttttcttttatatctttatttttatattactaatttctaacttatatgtttcatttctttccttctaatttcttggggtttgtattcattatctattgctgggtaacaaattactccctattttttcgctgaatacaacaaccatttattattatttctgtgggtcaggaatccagaagtggttctggcttggggtctcccacagcctacggtctaggttttgaccaaggctacaattatcttgaggctgaactgaagaagatccgcttccaagctcactcacatggctactggcagatctcagaagatacaatttcaagcttactcacgtggcttctggcaggcctcagaaaatctgcttccaaccttacttatgtggctgttcccaaggttcaggtactcagtggctattggccagagacatcagtttcttactacatgagtttttccataggcaagctcataaggtggcagctttcttctcccagaaggagagaatccaagaaggaaatagagcaaaaagaagcttcccacatagaagccaccattttttataacctaatctcagaaatgacattccatcacttctgccatattttattccttagtagtgagtcactaaatcaagcccacactcagtgggagggtattatggtacacaataataaataccagaggcagggatcatgtgagccacctcacaggctgcctaccacattgaaccctctggtcctcagtgattcacatcccttccacatgcagaatacactcgcccctcctcaaggcctctaaaaatcttattctggcatagcatcagctcagattccaaactctcactctaaatcagtagttcaggtgcagatgaagctccatgggggtagctctttaaatacaactccttgagttcagttctctttaccatgagactaaaaagatgttatctgcaccaacacaacaaacataaaatggtgggacaggcataagataaatgctatagacatgcctgtgttcaaacaggagaaaaatgggaggcacaaaggagttattggcccatagcaagtctacaactgtagtagcctgttcttgtgttgctatgaagaaatacctgaggctgggtaatttataaagaaaagaggtttaattggctcatggttctccaggctgtacagaaagcaaagtgccagcatctgcttctgttaagggcctcaggaaacttacatcatgatggaaggtgaaggggaaccagcacatcacttggcgagagcaggagcaagagagtgattgggagaggtcctagacttgtaaacaaccatatctcgtgtgaactaaccgagtgagaactcacttatcaccaaggggatagtgctaagccatttatgaagaatctgccctcgtgatccagtatgtcccaccaggccccacctccaacactgggaatcacatttcaacatgagagttggaagggacattcaaatgacatcagtaacacaacactcatttataaattttcctctcaataccattttagttgcatgccatatactttgatatacattgccattatttatttttaggtattttctaatttccttgtaatccacaagttatttatgaataattttcaagactttaatatatagaaagattggtggcattttttactggtttttagtataattttatagtgatcatagtgtatattttgtatgaaactgatactttttcatcacttgggacttgctttatttacttagaatatggttaattttcctaaatttttatattatttgcatggttcaaaatattacttgtattctacaaattatctataatcttactaattttagagtagcatgatcaattgctgagtgagatcaattaaatctcctgccattgtcttcttctcattgtaattattatttttgttttatatatgttaatgccatgttattgggcacatacaaatttaagattgttatgtggtgaattatattgatttattttcaaatgttaaaccagattgcattcttggaataaacccaactaggttattatgtattatcttttttatatatcatctgattttgatttgtgaatattttatctagaatttttgcatctatttttgagatactggactgtaaatatccttcttataatgttcttatgtttggggatcactattagacctcataaagtgatttgggaatgtttttttttattattctcttgaagaatttgtgtaaattttcctgtggtaggtttaggtgaatttttaaaaatgtacttcttttaattgacaaatataaattgcatatatttatgttgtacaaaatgctgtcttggaatgtgtatatattgtggaatggttaaatcaagctaattaacatatgcatcacctcatatacctatacttatcatttatttttggtgagaacacttaaaatctattctcatagcaattttccagtatacaatacattgttattaactatagtcaccatgtcgtacaatagatctcttgaatttatacttcctatctagctgaaattttgtatcctttgaccaacatttcccaatctccccaattccctaagtgaagtttttgttgtcattgttgatttgttgctttttgtatatgtggtaggcagaattctaagaatgaccctaaatgaccctcaatcttgtataatcccccccccctttgagtatggacagaacctaggaatgaggtatcactccaaggttatttgagtgagcctaatttaatcacatgagctctttaaaagccaagagttttctctggctggttgcagaagaagtcacagatattcaaaacatgggaaggattgaacacaccactgctggcttaaagatggagggaaccatgtaatggggaatgtgggagcccttgagaggctgagtgtggccgccatctgccaccccgcaaggaaacagggacctcagtcctacaagcacaaggaaatgaattctgccaacaataagtgagcttggaagaggactccagaccccagatgagacccttagcccctgctgactctttgatttcagtctggtgagaccctgagcagagaatccagccacaccatgctagactgctgacctacagaactgtgagctaataaatggtgttgctttaggccatctttgtggtaatttgttacacagaaatagaaatccaaagcagtagatatccagctttggatctgtagcacttactaaatcttaaactgtcttttgtcacattgggaaaattctctgccataatccctttaaatactgtttctatgccattccatcttctctctccttctgggactacatatatgtgtgtgcctttgcatgtgtctttgtgtgtgtgtgtgtgtgtgtgtgtgtgtgtcttgtctcagtgagccttgtctctgtatttccatgtatgccttatgctcttttcagtatcttccatctttttctctatatatttaagtctggacttttttaaccctgtattaaaatttagccattctcttttctgatctatatgttcttaaatctgtccattgagcttttaatttcgatgatcacatgcttcagttctataacttccatttgattgtttttatagtttccagttctctaccaaaatgattcatcttgtcccttaattccttaagcatattaatcaaacttattttaaagctcatgactgacaactcccttatttagacttcctttgaatctgtttttattgtttaatttttcttttagtttttagtcaagctgagtgctacgcattgtttgtgagcaattattgagttttacttattcctctggtgggagaactaagcaagatggtctatatttttgtctaattttactttctgagtaaaatcttcccaggcctcaactaaaagcttgggctttttccagatatcttcctatttgccctgtgtgtgtgtgtgtgtgtgtgtgtgtgtgtgtgtgtgtgtgtgtgtgtgtgtggagatggggtttttccatgttgccccggctggtcttgaactcctgagctcaagcgatccacctgcctcaacctcccaaacctatttgtccttaaatttcactctcatttcattcttcagccctttgactattccaaagttgctgcatactgtctttatcttttagctgctgtgattgaaatcaacgaataactcatggggaacagcaatgcacaatcacttcttcagaatttctttatctcctggatcttggcagcacaagtcatgattgtccacttgtctagttgttctcagtgaaagagtttgtccaaagcaacttcccctgcttttgctggcagtactgtttgtttgttaatttgtttttgagacaaagtctccctctgtctcccaggctggagtgcagtggctcaatctcggctcactgcaagctccgcctcccaggttcacgccattctcctgcctcagcctcccaagtagctgggactacaggcgcccgccaccatgcccggctaattttttgtatttttagtagacacagggtttcaccgtgttagccaggatggtctcgatcttctgacctcatgatctgcccacctcggcttcccaaagtgctgggattacaggcatgagccaccgcgcatggccggcagtattgtttttaatagtaaaatctggaaacaatccaaatgtctatgaagagtagactgtgtaaatacattatagtatgtccatacaatgcaatattacgtaacagtgaaaattagagaactgtagctacaaatgtcaatatcaatgaatctcaaaagtgtaatgttgtatgaaaaaaacaattcataggagaatacttatgcatgattccattttacaggcaaaactaaacaggcaaaacaaaacaataaatgagtaaaatataaggaaaaacaagggaattgttaacataaaatgtactatatcttggttgcatcttaggatgcaagagggatataattcaggaggggcttatccagggtactataaaggcctggaaatttcctgtttcttaagctagctagtggatatatagtagttaatttcctttttattatgatcaactatacatatatgttatacatatactattttatgtataacatattccccaataagaaaataaatttaaaacaaagaaacaaaaagaaataaaagaaaattacctaaaaatgaagaacctataaattaagaaacaaagtaattttatattaaatggtgaaaaatactaaagcctgttacaaaaatcaaaagaaacatgatatatccctatccctactacttttcaatattaatttctgccacctaatgcaatgtcaggaaaattaacatcttatacacttcgtacaaaaaaaatacaaagttattttggtttgcaggtgatatgattgtaaaccccccaaaaactccaatgattttatgaaaaactactagaatctaataaacaagtatattgagatgactggagtcattttaaagacaaatggcagtgattttctgtatatttaatgtccacttaaaaatagaatttaaaattttgacacaatgcaataaatttataaaataactagtaatacatttaataaatcagaatatttctatgaggaacactataaagaattactggacaaaaataagacaataaatggaaggatatattcttggaaggaaaaatttaatctcattaaaaagtcaatccttcctaaatcaatatataaatctaatccatttctgattttttttacaattaaggatatgaataagggcatatgtataagggtattaataacagaattatatacacgtatagaactagaaatactttaatgtccaacaatagaggatttgttaagtaagtttcttgtacatatttttattagatatttttgaagtcattttatttggggaaataccttatgacgtaggaaactggtcacaaaataatattagactaaataactagactaaaatatacatagaactcagaaataactaaaagaaaatatataaatatctaacagtcattatctttgggttttggcactgataggtaatttttaaaatgctcttctggctgggcacggtggctcatgcctgtaatcccagcactttgggaggccaaggtagtaggatcacttgagcccaagagtttgagaccagctgggcaacatggcaaaaccttgtctctactaaaaatacaaaaaattagctgggcgtgggggtacacacctgtagttcccgctactcaggaggctgaggtgggaggatcacgtgagccagggaggcagaagttattgcaatgagccgagatggagccactgcactccagcctaggtgatgaagtgagaacctgtctcaaaaaagaaagaaaagaaaagagaaaagagaagaaaagaaaagaaaagaaaaggaaaggaaaagaaaagaaacgctcttctgtactttttcacattttttacaatgagtgtgtgttactcttaaaatcaggaaagcgatcaatgttatttaaagaagaaaatagagccgggctcagtggttcacgcctgtaatcctggcactttgggaggccaaggtgggtggatcacctgaggtcaggggttcaagaccagcctggccaacatggtgaaatcctgtctctactaaaaatacaaaacagccaggcatgttggcaggcacctgtaatcccagctactcgggagactgaggcaggagaatcacttgaacctgggaggcggaggttacagtaagctgagactgtgctattgcactccagcctgggtgacaagagtgaaactccatctcaaaaaataaaaaatgaattaaattaataaatacataaagaaagaagaaaataggtgtattccgctctgagaaggaaagcatttaccccagtatatgaatgtctctgtgtgtttgtatttcctccactcatacttgtgtcattgtgtttctgcacaaggtactgatgggcatgccctatgggagtattcccagaaagacagtgcctcgggctgaggaagaaaaggccatggatttttctgtcctttgggattttgaggtactattgtcaacatgccaatgaacttccatttgtgattataaaggctaaagattgcatggataagtatgaaatagtgcgtttaattattgaaaaaccattgctttaataggatcccagcactaagctaaatgagcttgcaaaccatgtctctgcacagtcttcccgggtctccttcacgcactgctctctccagccacactctgacagatgtgggctccccatgcagccactgcacctctctgtctgccaggtctctgtaaggtgatctcacggtatgcttttctttcctcattcccacattaagaccccagatctatctccactccaggcttccccaagtttcacatgacatcttcaactgaatgtcctacttgctcttcaaatgcaacacctatccagccaaaacccacatctctttttcccagctcctttattggaatcaccattcatccaatcatccatgtctgaagcctgaaaatcatcccacgcttctacctcttcctcaccaaccacccgccactgccatccaaccaaccactaaatctgaacctacctactaaatatttcttaaatcttttgtaaacccaattgtattagttcatgttcacactactacctgagactgtgtcatttataaataaatgggtttaattggttcacagttccgcatggctggggaggcctcaagaaacttgcaatcacagtggaaggcaaaggggaagcaaggcacttcttacatggcagcagaagacagagagcacaggggaaatgccagaaacttatcagaacaaccagatctcaccagaactccctccctatcatgagaacagcatgggggaaactgtccccatgatccattcacctcccaccaggtccctccctcaacacctggggattacaattgaagatgagatttggctggggacacagagccaaaccatatcaccaattaagaaccttggcttttattccatttgggaatgagaatcaatgaatatctgaggaggaagaaaatcagtgaatatctggactgagtaagaaaaagccacggagtttttcatccttcaagatttcaaggtgctattgccaatgtaccaatgaacttccacttgtgattgtaaggcctaaagattgcgtgtgtaagtgtgaaacagtggacttgattattgaaaaaccagttctttaatcaaataggatcccatcattaggcaaaatgcgtttttccatctcttttaccttcactttgaataacgtcctccctttactggaactactgtcagaatcatctacctctcctccctgccttggcttggctcctaaaatttccattccctttgttgctggagtgatctttataaaatgcagatctgaccctgtcactcccctacctcaaattttcattgattctcattcccagtggaataaaatccagtgttcttaattgggtttacaaaggaactgttcatgacctggctgctccctacctctccagtaatacctcacactttagtgccccaatgccaccaagctttggggaagtccctgcacgcatcacacactgtcattgcctctctgcctttgcttatggccctctgcctgcagcactcttccctcctttgtgagcttcatactcccatgcctctggaggcttactctgcagctccaagggcttcctaaggctgggaggcatggctgtagtgctgcccacagcaagtcattgctgctgccatccttcactctcaaagtcagattggagacccttcagaaagttatttggaacaggggttcccaactatactgttactaaggattccttttttttttttttttttttgagacagagtctccctctgttgcccaggctggagtgcacgggcatgatctctgctcactgcaacctccacctcccaggttcaagtgattctcctgcctcagcctcccaagtagctgagattacaggcacctgctattacacctggcaaatttttgtatttttagtagagacaaggtttcactacgttagccaggttggtcttgaacccctggcctcaagtgatctgcctacttcagcctcccaaagtgctgggattacgggcgtgagccacagtgcccaaccccctatccctaatttgatcccaaatgttaacaacactctcttctccctcccatgtctccatgcactctatgtaatgaggaaatagagggaatgaaggagagaaagaaggggagatatggaggggctctggagccactggaggaggtgaagggaagaacaagaacatctggaactcttccttcggcccttagattcggttaagactctgagaaagaaatccctggtagagtagacatgtctggtaaccaccagctctgagcttaccaacccagagcatttggctttgctgtcccccagggctatatcaagtactctgcactcttctatggctactacaacaaccagaggaccatcgggtggctgaggtaccggctgcctatggcttactttatggtgggggtcagcgtgttcggctacagcctgattattgtcattcgatcgtaagtatgaccgtctcatccgcaggctttgacttcacagccacagctcactcccctggccactctatgcctacctcccttctggtggggcattcagagagaaaacaggaaatgagcacagaaagcatatgcacattataatttgtggtatgaaagacatgaaccaggccatgtgggatgtgctgggaaataggattgaaacccctttggatgaggctgagaacgccagccatgctgaaattctggggagcagcattttagacaaaagaagagcatgtgcaaaggccctgaggccgcaaatagcctagtgttttcccaaactgccaaaaggccagtgtggcttgagagggagcatagtacctagtaaggtaggcctggaggtttgtcaggcctgtttttgcttttgtccagagctcagcttcctccaaaaaactcttctgctcctccaaactctagcttgtgtgttagaaccaaggctggcatatagaaagatacaaccaaataaacttatactaaataaatatatgtggcagtgattaaccatggcggcctctctggccccaactctacttgtctctgtggtcagaagtggccttttaatatgtctgtaactcttaattcctattctctgaaaacttggcccagcccatggattgatcgccttcttcagaatcaggggaccccatcagctgtggctgggggtcacggagtggaaggcactgtctcctacacaaacctatccacctgggcccactctcccttcagcacagacatgaggggtcacagcctcccagaagagggtggctgtgtctccaggagaggagtggagcactgggtagagtgaagtctgggtacagcccctgaaagggcaatggggacgcttggttttctttcacatggtctcaggcggaaatgctgttgttcccaagaccctgcccagcactcgacagtgaccactgggtgatctctgactgcacagccctatcaggcaaaaggaaaagaacaaggagacaggcttgcttttattcttagccctcatgttgttgctttttccctgctctcaccccagataagtatagaaatatgcaaagttttcgtgacaaaccaaaaaagctaactaagccctgtggaacagcaaatccagagagccaacatgttagggaagatgacaaacccctcatagtatcttatagcacccctgtttggaattctgtgattcccacagggtcaaactctagggagcataggttgaagacaggtaggatgaaataggaaggtccaaggtgctttcagccaaacttgattaagagaaggatatatgacctgattgtattaggacggtgcaaaagtaattgatggttttgcaattaaaagtagtaccgggccgggcgtggtggctcacacctgtaatcccagcactttgggaggccgaggcaggcagatcacctgaggtcaggagttcgagaccagcctggccaacatggcaaaaccccatctctaccaaaaatacaaaaaattagccaggcgtcctggcaggtgtttgtaatcccagctactcgggaggctgagacaggagaattgcttaaacccgggaggtggaggctgcagtgagccaagatcaggccactgcactccagcctggacgacagagcgagactctgttaccaaaaaaaaaaaaaaaaagtagcacaacaaagtagcaccagccacctcagtgtgttttgcattttatatcagaaaaaaatatatatgtgtgtgtgtgtgtgtgtgtgtgtgtatgtgtgtgtgtgttctatccaagaaaatagatgacttagaaggggacgttcctgtttgagaatagactcccgtatagagttctcaaactgcatttgcagatgagtcaagccacaggaaatcgggtgtagggaagaaaacatggtcacgtgtcttgtctcctgcaggctttttattacctcattgataccatgtgtgctttcaggggactctgaatttggggggaagggtgtcctggctatcctcaaagctgtcttggctcaagtccctgcctggcttgttttgtcactgaatgtcagctacctgtttatctgttacctgtgtccgagactggctaggccaaggttccctgggggtgacacagcagaaagagggcagacgtcacaacagtgctgtgtgccctacaggatggccagcaatacccaaggaagcacaggcgaaggggagagtgacaacttcacattcagcttcaagatgttcaccagctgggactacctgatcgggaattcagagacagctgataacaaatatgcatccatcaccaccagcttcaaggtagtcaccccagggcagttcccacttccggagaactctaggtccctctggtcattgagagacttctcccagctgggacatagaaaataaggtcctcaaataatttgtggcaagagccttcccagaaatgtgagcccagttttcaaacccttaagtaagaatgttcgtggctggtgcccactgtctgtttcttttcttttctttttgagacagcatctctctcccattgcccaggctggagtgcagtggtgtgctctcagcacactacaacctctgcctcctgggctcaagcgatcctcctgcctcagcctcccgagtagctgggactacaggtgcctgccactatgcccagctaatttttttttttttttgtatttttagtagagatggggttttaccatgttggtcaggctggtcttgaactgctgacctcaagtgatctgccctcctgcacctcccaaagtgctgggattacagacatgagccaccacgcccagcctgtctgtttcttaatatgacagagtatcctggatgctgagacctggtgctgcctgtttctacgtgaaacacatttctgctggaataagtggaaggactcatttggggaaagcatttctcaactttttctgcatactagaatcacctgaggagcttaaaagatctcctgggatccactaacagagactctgatataactggcctggagtagggtcctgacattggtttttcaaaagctccccaagtgattagaatactcagaaagagctgagaaccctggtttggggctgtgggaataaagaaatcaacactgatggctgcgccaaaatctcagaaatcaccactgaagaacttattcatgtaaccaaacaccacctgttccccagaaagctagtgaaatgaaaaaaaaaaaaaagaatttgaacttggtagttggaaaataacaaagagagagaaagggagacagagtgaaagcttggtgacagaaggctagcaatatggtctgtgcagatcagtcccacaggggctgaggtgggcaaacctttgcacgtgtgtaggattctgactgagagggttccttcacagaccttgcctctactttatttatttatttatttatttatttatttatttattgagacagagtgtcgctctgtcacccagggtggagtgtagtggcaaaatctcagctcactgcaacctccggctcctgggttcaagtgattctcctgcttcagcctcttgagtagctgggattacaggtgcacatcaccatgcccggctaatttttttgtatttttagtagagacatggtttcaccaggccagtctcaaactcctgacctcaagtgatctgcccgcctcggcctcccaaagtgctgggattacaagcatgagccactgtgcccagcccatgtctctactttaaaatcaccatttattttctaaacaagagtttttttcatgtgaagtgctgctgacaaagtttccatcattttccagtgagactgggtgttgtttatttatgtgactggtataaaaacaggcatggggggttctgaaaacaaaacaaaacaaatcaaaacacagttccatgagataaaaaaagagacagaaagtttcctgtgtgtacatgtccaaaaaaaaggtacaacaaagcagaaaaacccttctgagggtgcataataaacaaaggactattttagggttctaagttgcagttggagtgtatgtataattgagtggttgggtttgcatatttaaaaaataaaaagtatttttagtagagatggggtttcaccattttggccaggctgatcttgaactcctgacctcaaatgatccacctgccaatcccagctactcgggaggctgaggcaggagaatctcttgaatccaaaagacagaagttgcggagagccaagatcgcaccacggcattccagcctgagtgacagagtgagactctggctcaaaatgaatgaatgaatgggataatgttaaaaaaaaaaaaaaaaaaaagatgaaatcaaccctatgtttctttcaatccacacacaaataatttctttacaagagaggtttgaggaggtctacagaactatagctcatataaaataaccatccagctgggaagcaaatgaatgaaggccaaagctgtaatgctgaagcattgtacattgtactttgcccccgtgattgtaaaaaccattccaagttcttcgttttttttttctttaattacatttttttttttttttttttttttggagacaaggtctcactctggctggagtgccatgcccagttaaatttttctattttttgtagagatgaagtctctcactatgttgcccaggctggtctcaaattcctggcctcaagccatcctccctccctggcctcccaaagcactgggattacaggtgtgagccactgcacccagctcccattccaagttctttatggctcaatatttctcctgtctgatcagtgaagctttctttcccccaggacctagcaaagctcacattacactacaactgcgcttcgttctcttttctttgcccctcccctctcttgaattccttcctgctgtccactgactgatgcctgcagatggcagggacacccactaggaaaagggcttgagctcagcaactcacagcatgggtttcccagccctagagcccggtgggctttgcagtgcatggagcagggagctgactctgtctcctctccttctccttcttacagcaatggggggcttatggccacttccatccaaagccagggtaggggtgactgggggctttgacttttcctccaggattgtgagagagggacaaagaagatcaatgtctttgaaacactttgaacatgtgagaagtaaaatgacttcttttgtaagtttattaaaagagacataatatacttgtataacagaatagatgtgaaaattctgtgaattaagactttggggtctgggagagctcatttttcatcctggttctaccaattactctgtgtctagggcacaagtttaataatcaaaaatcaatttttatatactaacagaaaacaattcgaaaataagtttaaggccaggcacagtggctcatgcctgtaatcccagcactttgggaggctgagacaggtggatcacctgaggtcaggagtttgagatcagcctggacaacatggggaaaccctgcctctactaaagatacaaaaattagccgggtgtggctgggtgtggtggctcacgcctgtaatcccagaactttgggacgctgaggcgggcagatcacgaggtcaagagatcgagaccatcctggctaatacagtgaaaccctgtctctactaaaaatacaaaaaaaattagccgggcatggtggcgggtgcctgtagttccagctacttgggaggctgaggcaggagaatggcgtgaacctgggaggcggagcttgcagtgagccgagattgtgccactgcactccaggctgggtgacagagcaagactcggtctcaaaaaaaaaaaaatttagccgggtgtggtggtgggcacctgtaatcccagctactcaggaggctgaggcaggagaatcacttgaacttaggaggcggaggttgcagtgagccgagatcatgccactgcactccagcctaggcgacgcagcaagactgtctcagaaaaaaaaaaaaaaaaaaagaaaaaaaagtttaagttctattaatagtatccaaaaaaaacccataaaattcctagacataaatttaaccaaaataatgtacaagaccattacaccaaaagtataaaatattgccgaaagaaattaagaaaccctaatggagagatatgctatgctgatggattagaacagaggttggcaaactatggcccacaggccaaatccagcctgctgcctacttttacaaataatgttttatcgaaacaaaggcattccaatttatttacatcttgtctatggttgctttcatgccacaatggcatagctgagtggttgtgagagagaccatatgaccagcaaaccaaaaatactatctagctttttatagaatgagtttgccaaccctcgattagaagactcaatattttaagattcagttggaatctatttgacctatagacttaacatgatcccaatcagttactgaaatctctctgggccttggggtctgtaatgtgggtaataacagtaactattctactggtgtgttgctgggattaagagggacaatgcagccaggcacagtggctcatgcctgtaatcccagcagtttgggaggctgaggcaggcagatcacctaaggtcaggagatcgagaccagcctgaccaacatggagaaaccccatctctactaaagatataaaattagccaggcgtggtggtgcatgcctgtaatcccagctactcgggaggctgaggcaggagaatcacttgaacccaggaggtggtgagccgagattgcaccattgcaccccagcctgagcaacaagagcaaaactctgtctcaaaaaagaaaaaaagagggacaatgcacggaaagtaccacgtctgacacatggtgactatttaagaaatctaagtgtttcttacatgtactggaatagcaataacaacaaacatatttttctaaagaaaataattatccatagggcacagggcattacatcatctcctctgtattatttcatttctggaaatatagaaagtactattttcagggacccaacagccatggttctggcatttctggcctgacatttatgcacatctcattttcacacattaaggaatcaatagtggatgaacaagagagtaacaaagaagaaaatatccatctgacaagatttcttcgtgtcctggccaactttctcatcatctgctgtttgtgtggaagtgggtacctcatttactttgtggttaagcgatctcagcaattctccaaaatgcagaatgtcagctggtatgaaaggaatgaggtaagaaaaacatcgctgatgaactgaaggttgatggcaaatactgaaatcactggttcctatgccattcatttcatttatcgaaagtctggattataggcttgttttaataagtgaaattacatccccttccagtcaaatagcatgaatatcctgaagaaaaagtcacctattattaggttttgggaactggcttttacaactagaaaaactggattagcaactggatagccacctgtgcaacaccaattactaacgaggcgatcctttcctcacagctttgcagcgccatacatcgtaaatcaagtgtctattaatgcatgggtatgattctgggctctcttttctattcctgtttgtctattcctgcacaaataacaaactgatatactatgcatttacactatgtcttaatatctgatagagcgagttttctcatcaagctccacaataaaacacattaaggttttattgtgataacacagaatccataaacctctttcgggaatttgacatctgtggtcgtttgtgaaaatggctacaaattcttcctatccttgtatgcacatccctttgctttcctttgcacattcacgaagaggtggaatctgtgtcctccatcttttgaatccaccttagcttggtcatgtgacttggtttagccaatggaacaatagcaaccatgaaacatgcagagatttgaatagtgcttgtgtattgagacttgctcttttactgcttttgggaaccctgagaccttcgtcatgtgaataatctctggctagcctcctgaatgatgagacacatggtccagttatctccccaccctggccaatagccagtaaaccaccagatatttgaatggagccatcagctatcagcaggtaaggccaacaaaagaacgacccagttaagcccagtttaaaaaaaaaaaaaatgctgccccacagaatcatgagctaaataaattaataataagaaagagtttatcttgcattcaaacagcaatttaaaaaaagaagacagcctatcttcccccaacaaagcaagaaaggatataaaaaaggaaatatggcattgataggaggacaaatataaagcacaaaatcagatttaagtctaaatatatcagtgattctaatagatgtaaatggatttgatgctacagtttgaggacaataataattagatcaaaaactgttaaagctatgtgctatttataattaacccatctaaaacatcaggacacagaaaggtttaaaataaaagaatgggccagtggtttctgctagtggtggcctaggttatttggatcaagtaattaattaaaagccctaaaaatgctcatttaaagaaaaagcataccttgaaaacactgaggatttgaaaacacagtgagagacccccaagaccaattttaagtgaaagcctgtgaccagaaatataaggggagtatcagtgccaagtcttatgctctgaaggcaaatgctgacttttcaaacacttgttcctgtgctctagttccatcccactagggccagtgtcttagcctatgttgtgttaattaggttcctgcagccttgatgtgctgactctgtcctaagttgggaagtttcacaatagccaactagcagttcttgaattcctgatttatttccaggccttcataccccatcagtcactccactaatgttcaacacacaggcagtaataagagggaggtaacaaaccacaacgatggctccggagaccaacacatcaacagatgagccaagtgggtccagaagtcattcaggcactggccagcagaagtgggcatcgctgtttctctcttgcagagcttccagcagccactgccaaaatcgggagaaggttccagagttcccatgggcagagcctccgaaggctttttgaacaaggccaggtcctggctgcttttatgatcctcccagatgggtctgttctctttatctcagccaacgtttcattctctaccagttaatttcaggaaataccaggcagcagcaggtgtttgcttatcacctcagtccattatatacatgcttatcactttgagagagggcggaacaatttcactatgggcttaatgctttttgacatgagtgactctattttgagacattaggatcacaaattatgatatatgagtttgctagggctgtgatattattatatatttcttattatatattggtctgctcccagtttctggcacacagcccctaaaacccttggaatctctaaagtgatcagtgtttttttttgtatgctagtaagatgactggttgctggaagctcctggataacctctgcatctgggctggctgccaggggaaccagccagtgattagaaaattggaactttcagccgtatcccgtcacctccagggaggggagaggggctgaggttgagttgatcactaatggccagtgatttaatcaatcatgactacataatgacgcctccataaaaacccaaagggcagagtttgaagagtgggcctggaagctccaagccccttgcccataccttaccctatgcatctcttccacctggccattcctgagttatatcctttgaaataaacagataatctagtaattaaattgttttcctgaatgatttgcttactctagcaaatgaccaaacccaagaaggggattgtgagaatctctgctttatagccaaatcgaacagaagttgccagtaacctggtgacctaatacttgtgattggcatccaaagtgggggcaggcttgtgggactgagcccttcacctgtggagtctgtgctcactctgattagtgtcttaattgaattgaattgaattttacgctacgcagctggtatcagaaaattggttggtatgggaaaaaatttggtgtcagaagtgtcaaatgtgtctgacacatttggtgtcagaagtgtcctggaagtaaagtgttgatagtatagaaggaaaaacatataggctgccacaacaaagtaccacagactgagtagcttaaacaacagaaatgtatttgctcaccgttctggaggctggaagtccgagatcaaggagttggcaggtttgctttcccctgaggcttgcaggtgtctgtcttctccctgtgtccttctgtgacctttcttctgtgcatgtgcatggagagagagagagagagatctctggtatcttttcctcttcttataagaacaccagtcttattggattaggtcccacccttgtgacctcacttaaccttaattacctccttaaaggccccatctccaaatagtcacattgagagttaggacttcaagatacaaatttgtgggaggaggaggagacacgattcaatccataaagtccaaagagacaaagtttccaaaccaggacttttccatattaggaggaggggaaaatctccctaaatagacctcaccacccctctcccaggagttaaggcattcaaggtatgggtgaacctgatctaaccctcctcccacctccagtaactactaagagggcagcttgctgtttaggctggaagtggaaaagagaaggaaaaggtgctgtccgcagagcctgtggcctcagaccttccactgagcagacttgtacctggggctgtcagaccttgactttggtttgaagcattgtagatggtagtgtaccaggtacctggcagaaccaagcttagagcctctctaattcagcatgtacatatctaggcctcagagaactccataaataattattaaagtcaatgaccagaaagaagtcaaaggttacctggtatacaagaaaacaaggcaaaatgatagacttgctctttttacctatatgccaagatttattttcctttttctttaaagtccattaactttacttaagaatacatcctggtattggtcattcttgatattctcaggtacacagtgtatttatttatttatttatttacttttgagatgaagtctcgctctgtcacccaggctggagtgcagtggcacgatcttggctcactgcaacctccacctcctgggttcaaacaattctcctgcctcagcctcctgagtaactgggattacaggcacgcatcaccatgcctggctaatttttgtatttttagtagagacagggtttcaccctgttggccaggctggtctcaaactcctgacctcaagtgatctgcctgcctcagcctcccaaagtgctgggattacaagtgtgagccaccataccagacccaaaagtttttaaaaatgttaggcagattcaaatcttgtttttcatttaagggaagatttattgaattataggtttttttaatttgttctattcccttttttgggttttcttctttaggacctcctattatacccgtgttgaatcttctttgtctctcttcaatatatcttgttttctcctgaatcctattaacttctttcttcatatattttttatttttaaaactttccccctttttatctttttcttgtcattgtcattatgttttgcaattgtgattctcttaggtattcttcaattttaatatagttttcccttaatttcttttttctttttttttttttttttttgcagtattctgtcaccctttttctgggtttttctaatttttatttatattgttttgtgacctatattttcttaacatctttcagttttctgtttttgaatactcattataattttttaactgttttatacaacttactttttggtgcgttttcattatctgaaagtttaacctacttcttgttctcttttccttgaaataactttgtatgggatttgacctagaaaaaacttttccactgttcatttttatataaagttagttttgctgaagttttagtgaggcatggttcaggatgactttcctaagttaacggagctctctcttccactgtttttatgaagtcttcaaaatatatggtggcttgctggatgagagagctcctgcctctcatcccttttctactttttatctagaccttcccattcctttatctatattccctctctctgctcaatttcaattctgttctcagaatagtctccttcatgttgtgccctgtcctgttagggagcttaactgacaaatttcaaaagttcaagaggcccaggctgttttagctcatctccagattaaccaagaatgaccttgcactcacctattattggaccgagcagagttcctcacagtgtcagctgctgttctcagattgttccactatgcttttcattgagtacctattagccattttgacatcctcctgttctcagattcattggataccccactgtttctcttgaccttctctcatccagacatgaactctgtaagtacttgtggctgttggtaatttgtattgtattgtagccacttgtatttaaggattcattaggacacctagcttcattgtctatgtgtttttttattttattatttaattgctttatccagttttacatggggattcgggagattcaaaaatcatgctgtgatggccaggtgcagtggctcacgcctgtaatcccagcactttgggaggccaaggcgggtggatcacctgaagtcaggagttcgagaccagcctggccaacatggtgaaacctcgtctctactaaatacaaaaaattagctgggcatggtggcgcatgcctgtagtcccagctacttgggaggctgaggcaggagaattgcttgaatcccagaggcggaggttgcagtgagccaagactgcgccattgcactccagcctgggtaacaagagcaaaactgtcttaaaaaaaaaaaaaagaaaaaaagaaattcatgctgtggctatcattatcttcccagaactccaagttattatttttagtatgaagatgcattcaccatgaaaaccatcattttctctcaggataaagtcctaaatggctttccctgacttaccttcccagttgtacccttatttttatttattattattattattattattattattattattattattatttgagatgaagtcttgctctgtcatccaggctggagtgcagtggcacgatttcagttcactgcaacctccgcctcccaggttcaagtgattctcttgcctcagtctcccaagtagctgggactacaggcacgcaccaccacacctggctaatttttgtatttttagtagagacgaggttttgccatgttggccaggctagtctcaaactcctgaacccaggtgatccacctgcctcagcctcccaaagtgctgggattacaggcatgacccactgcacctagcccccaattgtacctttagtcactcttactcttcccatcttcactaaactgcagcaccattggcctctgttctactgagatgccttctctcacacactctcatctctcttgaataatttcaggtatgagtttaaatgttatatccttatttctattatatacttaaagtatttaccctttgcagcatttttacctttgtaatgattaacttattatggaattatttacatctactttaagttcttgtgggcagagtgtgtgtgactttttatcctttgttgcatctttagaatttggcacagtgactcacacatagtaagtgcttaataaattagagatggaggaaagacaaaggagaaaactattaactgaatacctacaatagacctctatgcctattatttatgcctcatagcactatggcagggtaggcatccttagtcctagttttcacataaatatctgaggaccggaaagtttaagacacacagcttattagcaatggagtcaggattaggacccagtacctgtctggctctgagtctgttttgggggcctcattcctgattgcctaagcttacctctaacccactctggatcagtgcagttggacatcaactcagacactcccagcagtggattagaggccccagtgtagctcctgacctggtcagaatgggtttaagatatgggaaagacagggactttgggggcctctctgtaggatgggagaactgaggaatagagtaagaaaggaaaaacgtcccttccacaaagccttcactgggtcactaagctgtgagaaggactcaaaagatgcccaagatgaattctacccttaaggggattgcagtttccttaggatgcaggctcaacaagaataaaccaaagcacaaacaatagtaggcaggaataccgtgatcaaataagatgttttaggttacagatggaattgtccatgagagctgaagaggcagtggaattttgtggcaaaggcaggaattaggctgaacactacacaaacatataatgaagggcagtggtagatatggggcagtgatggctctccaggtgagaactacatggacaggtacggagatgatgagaaaccaagccaagggtcagtgtgagagagagtgggatagtcaagaccagccgagaagagttgaccaacttgcaatttgcagggatttactttccactgggtgagcagttgttttttgtttgtttttgtttttttgagatggagtcttgctctgtcacccaggctggagtgcagtggtgcaatctcgcctcactgtaacctccgcctccagggttcaagcaattctcctgcctcagcctcccaagtagctgggattacaggtacatgccaccacacccagctaattttttgtatttttagtagagacggggtttcaccatgttagccaggatctcctggctatctcctgacctcatgatctgcctgcctcggcttcccaaagtgctgggattacaggcgtgagccattgcgcctggccagaaagtgctattttcatcaatactagtaacaacaaccattatagcatctggtcacacagcaattatgatatgcaagcacaggccaagtgctcagggcatgttgatgcctttgccagggtcacacagcaagctgtgtagaccccagggcatctccaggcgcagcagagggggcagcagagaagtggagatggatggccatgggagtgcagagatggcagccaaacaagtataatgttgatgacacaacgtaggctttcctgattcctcaggtagagatcgtgatgtccctgcttggaatgttttgtccccctctgtttgaaaccatcgctgccctggagaattaccacccacgcactggactgaagtggcagctgggacgcatctttgcactcttcctggggaacctctacacatttctcttggccctgatggatgacgtccacctcaaggtaaaaaccacaacaccccccaccccactgcaattcctggtgcccatagtattttcttttttaatataataatttcattatatataattcatattaattaaataaatgtaaattaagaaaaataaaattaaaaaaaaactccttggactctatgacccaaagatgaccattgttaaccttttcctatagttttttactgtccttttctctggttgtcttttttcacatcatatacatgtcatttgataccttaatattttatcttcagccttttccacactgtttcagagctgccataaatgattaacagccaagtaattgtcctctaaggggctatgtcattacttaaccgtttatcaatgctcaccacacaattatggagcacccacaatggcaggccctggggtagagcagacaggaagacacagtcctgtcccaagtgtgttcacacactgggctgggagacagacttcattacagcacgctgtgggatgtgcttcagtagtggcaagcccagggcagcatggcagtgcacaggaggagctccagatccctccctggggaccttagcagacattggaaaaggcagagggaacagctgggtcaacagggaactggagtggagcagaagagtgaaaaatttagagcaaaggagggcccgatgatgctgatgcccctcttctccaccccttccctccttattattgagctgtaggaactttttcctgatgctaacagaaaactgttctaagcatggaagtgactgaatctggccctaacctctcctccccactcatctctggcttccctcctacccaggagactgctctaccctcctgagcctcacatttctgccacagggcaaaattctatcttgcctctctctccacccctctcctcatgtttgactagttgactaatccttcttgaggttttggcccagctgtcactgcctcccggaagtcttctgtggcccccattgtgtgatgtggatgctccttttcccagagagaatttctcacagctcgtatcagtctgttctgtaattgccagttcatctccatcatttactagactctaatctttctgagcgaacctccatctctcttggtcactcttgtatcaccactactttatatgcacagaagaagccctgaataaattattttcaagagaataatgaatgactggatagatgcatgaatggatggctgaatgcttagatggatgaatggatggatggatggatggatggatggatggatggatgggtgggtgggtgggtgggtggatggatggatggatggatggatggatggatggatggatgaatagacaagtggatggatggacagacggacagatgaatgctgacttagagtagaagataacttcatgggaaagacccaagaactacagcctctcctgtacatattgaaagcctgagaagggaattttggaaggactctgtccaggggagagcagaagctagatggtagggttgtggcatttgctggctttcactgttcttatggaaacagttggaccatccctagctccttcctaccccacacctccatcttctgttctagcttgctaatgaagagacaataaagaacatcactcactggactctgtttaactattacaactcttctggttggaacgagagtgtcccccgaccacccctgcaccctgcagatgtgccccggggttcttgctgggagacagctgtgggcattgtgagtagttacactctctaaaaaggtgacccctgttctcagttctttgttattccctccttgatgtttccatttgaggaataaccctgaaaacttaccagctgttcatccagcaaacatttcataatcatctaggaggaaataaaatgaccaaagcagatcctgtgacccctgggaactccaaatctctttggtgtctcaaaggttgtgattggtgtctggtagatattttcaatttttccaaaaacatagtaaattatgtctattctacaaatgcagagaaagctttgtccttcagtttttggtccttcttctatgtgcctctgtgcaaaacctgttttattttctctatatatcaaaaaaaagaaaaagaaaaagaaaaatctgactagcagaagatgaaaaaagctaggcattgtctccagtgactgacggtcacatttggtcttagtgggggcagctggcacttcagaataagtggggaagcaaggccttcgggtcctagtgatgatgactacgatgcattgggcatagtcaatttaacaggcaatttgcatttgcatacataattactaagtttcacaatagccttttgagattgatatcaatatcaacttcaagaggttcagagattattccaaagccatacaattggtaatgtggagctgggacctaaattaagcattttccagagccaggagtcgcctctcttcacacacaaaggatcagagggtcacagagacaaagtcaggtgggtgggggagagtttattagactctcaacaaactctcagggagggtgggagaagtgggcaaggtctccaaccaccccctcttcctgtgttcctctgcaggaattcatgaggctgacggtgtctgacatgctggtaacgtacatcaccatcctgctgggggacttcctacgggcttgttttgtgcggttcatgaactactgctggtgctgggacttggaggctggatttgtaggtcaccacttcatggacattccgcacaaaggaatttcaactatcttctttgatacttatagccagatgcattcttgggcatttcatttctttggaagcttaatgacggtctctgctctgtagagtagtaaagtgtttaatttgtatttcctttaagggtcctatttgccttcataagggaaactgctttttcccagtgtaatgaacaatgtgaccttctattctaggaaatggaggcatttggcctaggggaaagtggaccacacactccagtactgagccaatggttgatagggaattgcatctgagcagcctcaactctcattatgggggctgaaatctgacagtggaggcgaatatttcaggaagtcctggaacacaccaagaacacaataaccattggtcctgtcttctggatgatgctttgagaaacctcctttgacttgtattcccttatagccctcttccccacctacctggtaaatgtgtgtcatttcctctctgtagtgtccttctatgctctggcagaatctctggctcaggcacctgtgctgtacatgtctcttccacaacacctcactggcccagcctgcagtcactggtgtgcatgtaaggtacctacctcttacctgagctcctggtgaaaggctccgtaggatgttgacctatgtatccctcatcctggcctggcccaggtaagggccccagtacaggtttctgtcacattttttttcgttcagtcaccagtctcagttttaaacaagtctgctgagctcctcggcagccaggaaagcttcataatcttgtctgagaacgaagatgaaagaactttgtgctcaaagaggatgacatctttgatagaaagacacaatattactaagaggtcattgttcttaaatttgtttgtaagatcaccacgatttccaaataatactaaagttcatttgaaaaataagcatgtgagaatatccagaaaaaatatttaaaaagaagaataaggccaggtatggtggctcacacctgtaatcctagcactttgggaggccaaattaggagaattgcttgagtccaggagttcaagatcagcctgggcaatttagcaagaccccatctctacaaaaaataaaaaattagctgggtgtgctggtgcatgcctgtaatcccagctactcaggaggctaaggcaggaggatcccttgatcccttgatcacaccactgcattcctgcctaggcgacatagtgaggccctgtctcaaaaagtatataaagaaaaaataaaaagatgaataaaaggaactagacttaccataatactaaaacatatgataaagctataataactaaaactggtactagaaaatagaccaacatgtcaatggaacagaatagaaagtccagaaatagatactatctacatgggcctttagtttatgataaagggagactttcaaacacactggggggaaaggattatattaaaatatatataaattatataaaaatgtgggggattatatccctcattcatttcatctagattaattttaggcacatcaaagtcttaaacatcaaaaaaatgaaaatataaatttctaaaagaaagcatgtacaaacttagaatcttggagtgaggaagatttgtctaagtaggacatgaaacccagtagatatgtgttttttttaacattttaaaatattaaaatttaaattctgggtgggggtgcggtggctcacattgtagtcccagcactttgggaggctgaggtgggtggatcacttgaggtcaggaattcaagaccatcctggccagcatggtgaaactccatctctactaaaaatacaagaattagctgggcatggtgctgcacacctgtaatcccagctacttgggaggctgaggcaggagaatcacttgaaccaggaggcagaggttgcagtgagctgagattgtgccactgcactccagcctgggcaacagagcgagactccgtctcaataaataaacatccaagacttcaccccgtggacttaatgtatgcatgtttccttcttccatccatgcatgctggcccttcctttgtctctttcctaacttctcatctctccttcttgtgttctcatttccctttatctccatttctggaagacaaattgggatgtgggctttagcatgcttcatgaggaccctcatatcctcagtgctcacagattttatgttctttcaaatattcggacaaatcacgaaaactgcaaatgaggtaggctgaaaatatgaaccaagctgggtgctttcctttccgtgaactgctctcagactggaggaagaagagaaggagaaagaagagttggaaggatgatttggtttttgtttgtttttaagctttcttttcttttgactcctcatttaattatttgcatttcattatttattagatttctccttgattataatttcagggtatgtttctgattaaaacgttgataaaatgttctgttagaggcgagggtcttcccaagaacacgctgtcagcctgcaaggcctgaaagatagaaactgtcatttttttgtttactgaaataggcatttttaaagtttcagctttgagaatgtcaaattttttgtttaaaagttgaaaacatattaaagaaatagaatgctaaatctaaggttcttctctagttaccagagcaggctctttgggatggaatggccttggcttggccagttggttggtagtagggtttggctgaattcaccaaacgtgcttttttttttctctctctctctcgctccctccctccctctctagccttcatatgctgagtttgatattagtggaaatgtgctgggtttgatcttcaaccaaggaatgatctggtgagttatccatttcatctggtgatcgcctcatccaaggagtcaaaaaactggaatcccagactttgcaacttaactagttggaagaggctagataagtcctcttgcctctctgaactcccctctttcacatgaaaaatcaagagcgggactagatgagaagcaggacagtttctggcccacccatgtgctaccatagaagtagagagaaagggagaggggttggtggaggagaaaaggaaaaggaaggaaggcaggagagaaggagaagagggaagaaaaagggaagaaggaagaaagacaaaggaaagggaaaaggaaggagtaaagaagaggaggaaaagaggaggaaaggaaaataaagaaggagggagggagaaaagaaggaagagaaggtggaaggtaaatgaactatggaactccctcttctgaaaagggagttcaaggaggtacataacttcagccaaagactttcaaggtgccaagggctcgctgcaagccactgtccaattctctcaattgaaggacttcaaatactcttctgagcagcaatgctgttttatggaaaccgaggagaaacaggcaggagaccgtataatttgctagatgcctgggggcgagtcagtggtaaaatcttggccagagcttaagccaggaatgctcggagtgcctccctctcctgaggactgcatggttctggcttgatgatcgatattctggttaaatgggaggccccttacctggggacttgccaggaaagcagctcggcctcatgcccctaacccatccgtcccatttccttctatcacccttccctcgccttccctgctgtccagccaaccaggtgtttggtttctgccattccaggatgggctccttctatgctccaggcctggtgggcattaatgtgctgcgcctgctgacctccatgtacttccagtgctgggcggtgatgagcagcaacgtaccccatgaacgcgtgttcaaagcctcccgatccaacaacttctacatgggcctcctgctgctggtgctcttcctcagcctcctgccggtggcctacaccatcatgtccctcccaccctcctttgactgcgggccgttcaggtgcagagtctcagttgcccgggagcacctcccctcccgaggcagtctgctcagagggcctcggcccagaattccagttctggtttcatgccagcctgtaaaaggccatggaactttgggtgaatcaccgatgccatttaagagggttttctgccaggatggaaatgttaggtcgttctgtgtctgcgctgttcatttcagtagccaccagccacctgtggccgttgagtgcttgaaatgaggaactgagaaaattaatttctcatgtatttttctcatttatttattaatttttaactgatagttgtacatatttgggggtacatgtgatatttggatacatgtatacaatatataatgatcaaatcagggtaactgggatatccatcacatcaaacatttattttttattctttttagacagagtctcactctgtcacccaggctggagtgcagtggtgccatctcagcttactgcaacctctgcctgccaggttcaagcgattctcatgcctccacctcccaagtagctgggactacaggcatgcaccacaatgcccaactaatttttgtatttttagtagagacggggttttgccatgttgcccaggctggccttgaactcctggcctcaaacaatccacttgcctcggcctcccaaagtgttatgattacaggcgtgagccaccgtgcctggcctaaacatttatcttttctttgtgttgggaactttgaaattatacaatgaattattgttaactgtcatctccctgctgtgctatggaacactgggacttcttccctctatctaactgtatatttgtaccagttaaccaaccgtacttcatccccactcctctctatccttcccaacctctgatcacctcattctactctctacctccatgagatccacttttttagctcccacatgtgagtaagaaaatgcaatatttgtctttctgtgcctggcttatttcacttaacataatgacttcctgttccatccatgttgctgcaaatgacaggatttcgttcttaatttcaattaaaataaccacacatggctaatggctaccatattcgacagcacagttctacccttttaacacatggataacttactacctgggattactttaccataggataagtaatggtggatattctgaggatgaattaccatacacttacacgtgccgtttaaatgtgaagcagctgcagtggactcttgacagacctcaactgagctctctgctctccagagcattggcctgggggttcaatacataagtcaagctagttgggagactagatattgtataaaaagacaaataattatgtaaggaggtagatcaagagataatgtgcatctactgttctctttccaaatgcctgaccttctgaaaacaaagccctctgccaactccgtaaagagaggttctgtggttaaagcagtttaggacgtactgccccttctgtctgccattatctcacttagaaatgctcaatgcacactcctttgttaaaggctctgaagaatcatgcaatgaggtaacacctgtaagctagtgtctccgtccttattgaccacagaaccctttctgcatggatcactcatccagggctggaaatagggtgaggcaggtgagtgacgccctacactgcacatgagcaaccctgagggcattacttccttaaattgtgcactcagggcctcacccgcctcactctagtcccaaccctgcctgccaatgaggagaaaccctgtcccgtaaaagggtcgtatatgcaaaacagcccctaaatgcccaaagagcctagaatccaaaggaggaaggagacaaatgcagtttgtcggctttgggtgatttattaggggtaacttacagtcagatgcatggtcacaagcagccgtgagacaggtagatctccacacctcaatcccccaggcccagggcttctatcttggggaaagtatgcgtgctctggaaggaatgtataggtggctctgaacatcacagcctgtgatttctgcagcagcatcaagggttgttttggaggaaactttatgtaggaataagagttcctacataaagagtaatacatctgctagtcatgtgggaggcactctcagactcagggttagttagaagttacaaggcagattagcatgtaaaataaagtcactcatgtcccgcacaaacacactttgagaaatgctgatccggtctttctcagttcataaaggactttactagataaaggcctgtgatggttggagcccagggatgttagcaggagtgttccagcagggtgtgatctggaaaacagtgttcacacagaaggaggggatcagtctagaacagaaggaatgtgctgaagtgcagatggcctaagatttagccaggctgaaaggagaaccgaatggaagaagcctctgttggcttcttcctaagcaaggtttggagggctgggccctgggtgcaaatgccagccccctttttctcagcttcccatctgtcactgggtaggaggtcagcagggacaattatactatgataagaaccatctcctacagttgtatggaaaactgaacttataagaaaggaacttggctagccaggcatggtggtacgtgcctgtagtcccagctacttgggaggctgaggtgggaggattgcttgatcccaggaggtggaagttgcaataagccatgattgcaccactgcactccagcctgggcaacatagcaaggctctgcttcaaaaaagaaaaaaagaaaagagaagagaagaaaaaaacagaacttgggtatttagctgaagagattcccaagcaaagtattgaaggtacagcctggtttcttcatgctgcttatagaaaatgtgcaaggaaagaggtatgttgagtaagtaactgataaacaagaaagtaccaggatttgatgattctggaaattctcagccttatctagattgcaaaatatgctaaaactagattcactgtcatgagaatgtgctgtaaaaagaaagccaagagtgagtctggataaccttttgctagtgtttctgaaagatcaaaaggtctgaatatcattcacacagaaaactctgactaatcgtgtgactaatgcatcgcctcaaccatcacatcagaagtcaggaatagaaataggattatccagaaaagatcatgtgggactctcttctttaacagagtacattctcatgacatacatgaaaaactcacacagtttttgacaatattatatcagcggaaacattaccaacttggactgaaagaaacagaaagaagacaaaataaaggcagatcattggcctcccagaattctgtggcgggaaacagactgataaaatttactcagctgagacatgtgctatccttcaagaagaaggaagggtggaagtgttcttccaagggcagaactgtgaacccacaagggcaaagctatgggcacagtagggcagagtctgcagcccagaggattattctcaggactttaaaacttaatggagcttggctgattggatttcaaaattgcttggaactggtgattcctttcttccttccattttctcccttttggtaatggagtgtttacaacttttatcctatgcctgtcccaccattttatttttgagagtaaataactcattttctagttcctagaatcttgagatggggatatcatcatggattagccaggtgggccctaagtcacaagtgttcttataagaaggagggaggccgggtgcagtggctcacgcctgtaatcccacaactttgggaggctgaggcgggcagatcacgagatcaggagttcaagaccagcctggccaacatggtgaaaccccgtttctactaaagatacaaaaaattagccaggtgtggtggtgcgtgcctgtaatcccagctactcgggaggctgaggcaggagaatcgcttgaacccgggaggtggaggttgcagtgagccaagatcatgccactacactccagactgggcaacagggtgagactccatctcaacaacaacaaaaaaaaaaaaaaaggaaggagagggagggagatttgactacagaaaaatagaaggtgatgtgaccatagaagcaggcagagatttaaagattctgtgctgttggttttgaacatggagaaaccccatctctactaaaaatacaaaaactagccaggcgtggtggcaagtgcctataattccagctactcgcaaggctgaggcaggagaatcacttgaacccgggaggcagaggttgcagtgagccgaaatcatgccactgcactccagactgggcaacgagcaagactctgtctcaaaaaataaaaaataaaacccctaatggagcttggctgattggatttcaaaattgcttgaggttggtgattctttcttccttccattttctcctttttggtattggaaagtttataactgttatcctatgcctgccccaggttagtttcaacccagtgaatccctttcagacttctggcctccagaactgtaagatattaaatttgtattgttttaagccaccagcgtgacaaacagcaggcactagaatctgatacaccatctaattcaacgacaaaataatctacattcaactgtcacataaaagcctaacacgtaaacttaacttttctcatttgtacatggcgggtatgcactggaaataaaaataataataataataaatgaaacattgtcatacagtgatgtgcctggcacttgaaatgccatcatgctataactgcgtcattgcaatttgtggtgtgctgggcaacagttgtaagcaatgagatggccacaaatggtctctgacacaactgctcttccctgtcattatagcacaaaaaatgagtgagcatggctgtgttccaataatactttatttacagacactaaaattttaattttatacttcaatttttacatgtcacaaaatagtattcctgttttgacttgctttcaactacttaaaaatgtaaaaatgattcttagctcacagaccatatgaaaacaggtgacagactaggcgcagtggctcacacctgtaatcccagtactttgggaggccaaagcaggtggatcacctgaggtcaggagttcaagaccagcctggccaacatggcgaaaccccgtctctactaaaaatacaaaaattagccgggcgtagtggtgcctgcctgtaatccaccaggcattgtgtgtaaactctggaggctgagacaggagaattgcttgaaacccagaggcagaggttgcagtgagctgagattgcaccactgcactccagcctggacgacagagagagactctgtctcaaaaaaaaaagaaagaaagaaaagaaaagaaagaaaaagaaaacaggtaacaagctgaatttgtccatgagccattgtcggtgaactcctcatctatactttacacagaaaatgtttagctgcaaaattttgaagggcgcttataacttaacagcactacactcaatgttttatatcaattctcatctatatcctctaaacaatcttctgagataaatacaattattatacttaaaataccatattatactatagtattattatactacattatacagatggggaaactggggcagagaaattttcaataccttgcccaaaggtattgaacttctgcagatattgaacatccaatagaacttactgtaatgatgaaaacattccatatctgcatttctaacacagcagctactaatcatatgactattaagcacttgaaatgtgtaactaagaaactgaatttcaaatttgacttcatcttaatttttatttttaatagccacatcagacagcacagctttcgtggggagaaccagggcatgatatgaatacaagcagaaagagaataattgtcaggccgggcacagtggttcacgcctgtaatcccagcactttgggaggctgaggtgggcggatcatttgaggtcagaagtttgagagcagcctggccaacatggtgaaacaccatctctactaaaaatacaaaaaattaggcaggcgtggtggcgctcacctgtaatcccagttacttgaaaggctgaggcaggagaattgcttgaatccgggggtggaggttgcagtgagctgaaattgtgccactgcactcaagcctgggtgtcagagtgagactccatcaaaaaaaaaaaaaagacagagagagagagaataattgtccacgtgtctcaccagtgataaatgggggatcaaggatttaaaccaggaatttcaaaccccgtattccacctcttggcaccaaaattatcaaccaagagccagcagcatccaggagtctctgggccagcatttgtagaagtaaatctgcataatggttcttaggtatttgaagaaaataaaaattacagttgtgaactgtccaggagcctgtcctaggtgatccaatatctcctagacttaaaatctgaaggttaattctaggtatttctgagagacactcaggttgtccagcacatcagcttctgcagaactgtttcccaggcccaaaggaagctccatgttggcctggtagctacaaacacagacaatttctccagttagaatacatgaggaaaaccatttttttctggctgaggaaggtgtcagacacaaaagaccagtgaaggctaagaggttgtaagttacttaggatagaaagccggtgagccgtgtgccgacccagctgtcaccctagccagaatggcagcccctcagggggaattttttacttgcagttcatttggagcagagctctggttcttccaggaaagcagtggcaggcagcagccctggacctgggtaggggggccatggacacagctgtgaatgccacaggcacatggcagcatgttatattgtgtcctctcctttttccagtgggaaaaacagaatgtacgatgtcctccaagagaccattgaaaacgatttcccaaccttcctgggcaagatctttgctttcctcgccaatccaggcctgatcatcccagccatcctgctgatgttgtaagttagccaggacccatggctccaccccacggaaacttctccttgaatttgagacttccttggcaggtccttttcatcttgccttcttagtctgcactccccagaagcagaatccatgacaaggattcaagtgtaagtattttattagggagggggtgaggacttgagacaaggaagggaaaggaaaatgcatggttatcactgtgagaattctgggaggcagtgtgcctcagactcagccctccctaagggcaaaggatccgaggcatttatagaccagctcccagcgtcattcatgggtaaaatggcttcaaggggtgtgagtgaggggtccaagagggaagggaagcttctggtaacagagatgagggcaccagcaagtgcaagtcttttggagcacactgaaaatttgggtgagccctgacagtatctgcaacaactcccactaaaatgctcactagaaatatcaaagtcctgtgggctctgagcctatcaggaagctgaacggtgattcggcctgatcctggctgggcccacagcactactcgatggagcagcttatacactggaacaagctggttccttcatcactgtccccctcaacaaccattagagaacaagttcgaaaatctctgtatccccggtgccagcctaatgcctagagcatagcaggcaaacagtaaatgctcaaggaaagaactagggaagaaaggcaggaagccagagtcttggattggaattgttgccatcaaaaaatgtgctagtaaaaatgttagcattttttctttatttaaaaaaatcttattttggcatgcttttttaaaaattatgaaatattcccagcatacaaatgagtacagacaaccatgtacacgatcacaagattcaacagatgttaacattttgcaatatttacttcaggtttatctttcttcgtaatagaaataaaacattacagatgcacttcaagccccactcaatccttctttcttcctccctccccaaaggtaactattatacagactagatttaattatttccatgcatattttgtactttttaatcacatgtgtgtatagtactgtttccggagttttaaaccttttcatgaatgactcacattacatgcttttcctcaaacaacattatgttgggggatttatccatgcggatacatgagcacatgtttgaaggctctactatgttccatctcatgaataagccacagtttatccattcctctgcatagggatagttaggctgtttccacttttcggctattgcaaactgcgctccagccaacattttgtatatatctccttgcacaattctgagagttgctctaaggtagacatctagaagcagaattgtgggtcatcagcatgtgtttcttcaatctttttagatcttacagaattgctctccaaagtggttgtattccctttggactgttatttataaattccaactctccggtgaaattctccagctttctattttcttgaacatagtggttataattacttttaaaatcccagtctgatattccaatatctgaaccacctgggtgtatttttgttgtcatttgttttcctcttgtttatcctcagccctacttttatcatggcatgtaatttttactagatgtcagacatgtggatgaaaaattatagaggctgtgaataatgttatctttccccaaagggatgggttttttttcctgaagggcaaatggaatactaggagatcacttaatcctgtcaagacttgatgttttagctatctattattacataagaaacaacccccaaaactgaaaaataatattttattaatgaatctgcaatttgggtaggacttagcaggaatcattcttttcctctctactcaacatcatctgggtcagctcagctggaggctggagggcccactttcaagatggtcactcacatgactggccagctggcactggaggcctcacttccttctcacaagctgcttgggcttcctcatagtatggtggctgagtttcaggagcaagcatcccaagagaatgcagtggatatacatggcatctttacttactcctgccatactctattgaagcaatcacaaagggatacccaggttcaagagaaagaaatatagacttatcttttgatgaggcaatgacaagattctagaagcacatgtaagacaggagtcatagtattgtggccatctttggaaaatagtttgctattgctagctttgggctttctcagggctgatttatttcagttttgccctatttccaagacactgaccttactcctacaatgtgatccttactattgagcacagtcttttaggggtctcaactgaaagcctacagtgtttaccaattccctcctgtgacagttactacgggactgaacgaagtaggacgaacacagaaatgaagacaaagaaaaaaaggatttgttttaaagaacgggtcaggggactccttgcttctagtgagcaaaggcagccctgagcttctgcagccctgagcttctacagcccttcgtatttattgggtagaaagagcagggaggaggaggtaacgattggtcagctgtttgattgatcacgggttcacatcattgctaacaggcctcagatgtgcctaaccacaagaaacactgtgcctggggcgtgactgccctcagcattccttctgggtgccgacatagttgtcagcttgccaacatcctgcattcatgagaacagcttgctgtttactcatatagcctccagtcgtatactgagttgatcacgaccctcattcttttggcctccaccaccctccaccttggcagggcttaaaacccattctctcttttcccaattcttccgtctttgcttattctttttctccagtagtactgctacagccactgtgaaatctctgctctgctcttcagcctctctggtgtcattttcttctgggcttcctgaagcaattgaagaattggtcaatcatttgagggcaatttgtacacagagtttggcttatttatctgcaatttgttcttctctgggattctgcccctcaagtcccaaagactgtggcagtaattaactctgacctgcatcttctccacattgtaagatttccactttctgcttggactctgcttctgggtcacaaattggaaaatactctcagggagaaaccctggaggaatgtggagctcacctcacatgcttcccttctctcaagcatcaagtccctttagtctgcctgtcactctcccatgtcttaaactacagttttgtaaattttgctcagcatttacagttgtttttctctggagagctggaccaatacaagtcccttagtcaagaccagaaaaagaagtcttttctttcttcatttgattttccacagaggcaggctccctagcaccaaaacaacaacaaaaataatctgtgatcatttttattagaattcagaaagaaggccgagcatggtggctcacacctgtaatcccaatactttgggaggccgaggtgggcagatcacctgaggtcaggagtttgagaccagcctggccggcatggtgaaaccccatgtctactaaaaatacaaaaataagccagctgtggtggtgtgtgcctgtaatcccagctacttgagagactgaggtaggagaattgcttgaacccaggaggcagaggttgcagtgagccaagatcatgccactgcactccagcctgggcaaaagagcgagactctgtctcaaaaaaaaaaaaaaaatccagaaagaattggcacacctatgttgttaagttttccaatccaagaatactgtattccttatcattttttcatttatgtctctcaatatttttaagttttcttcataaatttcatgcacatttcttattaaatgtattcctctgcatttctctttttgttatgataaattaggatagctctttcatcatactttctaactagtttttgtttttctatgtaaatgttatttattttctatatataaattttgtattcagtcactgatatagttaggctttgtgcccccatccacatttcatcttgaattgtaatccccataatccccacatttcaagggcggggccaagtggaggtaattggttcatggaggcagttccccccgtgccgttcttgtgatagtgagtgagttctcacaagatctgatggttttataaggggctcttcccactttgctcggcacttctccttcccgccactttgtgaagaaggtgccttgcttccccttcaccttccacctgtaagtttcctgaggcctcaccagccatgctgaacagtgagtcaattaaatctctttcctttataaattactcagtcttgggtagttctttatagcagtatgaaaacaggctaataaggccgggcacagtggctcatgcctgtaatcccagcactttgggaggccgaggcgggcagatcacgaggtcaggagatcgagaccatcctggctaacacggtgaaaccccgtctctactaaaaacacaaaaaattagccgggcgtggtggcgggcgcctgtggtcccagctactcgggaggctgaggcaggagaatggcgtgaacccgggaggcggagcttgcagtgagccgagatcgcgccactgtactccagcctgggcgacagagtgagactccatctcaaaaaaaagaaaacaggctaatacagtcaccctatgagtgtattgtttatcatatttactcaaccaaagttcttgaatcttccaggtcattttctcatttgtaaacaatgaaaatgttatattttatttaattcttagatctctttttttctctgtaggattaattagtaccttccatgggaaaaacaagttaattaatatttggtgatgaaatatatttttgtatttttcctgcatttacagggtggggagtgcttttaatgttttcagttaagcacagtactgcttttttggagagttgagataagtatattcatgaaataaggaagaaaacaaccagggaatgtaagtcattgtaacataggtataagaaatcaataattaggaaagtggagtaacttttctaattattgatttcttacagaagtaaaaaaaaaaaaaaaaaagtgacctcaaaaggtggtggtgaatttagggccattactagcccatatagtaccttgtgcaaattttttaaaggtgcccactccttcagacggaggtaggcccatgccaaggggcacatttgacaaacagaatatggatagatttcagccagcagtcacccccttagtcaggtgccttttatgcagtaaacagcctgtataatggctatctaagccagaatctttttcctttggtgtagaccaggggtcatcaaactgtagtccacaagctaaatccggaccacacttgattttgttaaataaagttttattggaacatattcatgctcattcatttatttattatctatgactgtttttcacagaaaaagacagaatttacttgttgtgataaggaatgtattgtctagaaagactaaaatatttattgcctggccctctgcagaaaaagtttgctgatccctaatgcagacaataaggaaccactttcaaatatgctttgacactgaacttaaaacacctaatcagtaagacttaaaaataatgacaaataataagtccaaaaaatatttagaagaagaaggaattaggattgtagaagacaataaatcttgaacttgagccttgataaattcaaggctcaggaaaaggagtcgattgcattggatagaacttttagagttgttcaagtctactattttcttgttgaccttctaattgtttctattactgaaagtaaagcattgaatttccagctattattattggattgtccattatctctcccttaaattctgtttttgcttcgtatgttttaaggctgtgttgttaggtgcatatatgtttttacttattacattttcttgatgaaatgacccttttacaattacaaaataatcctatttgtctctaacaatttttgtcttaatgtgtttcccatccttttactttcaatctactattaccttaaaaatctgaagtgtgcattttttggctgggtgtggtggctcatgctggtaataccagcactttgggaggctgaggcaggaagattgcttgagcccaggagtttgatatcagcctgggcaacatggcaagacccatctctacaaaaactttaaaaattaactgagtgtggtggcacatgcctgtagttccagctacttgggaggcgacaaaggtggaggattgcttgaactgaaaaggttgaggctgcagtgaaccatgtttgtaccactgcattccaccctgggtgacagactgagaccttctctctaaataaataaatgaaataaaatatagtgtgcttctttggaaaagcatatagctgaagcatagtgtttatccattctgtcaatctgtgctttttatatggagtgtttgattcatttacatttaattaccaataagttaacatttatgtctgctgttttctatatgtcttatgtatttttgttattttattcctctattactgctttcttttgggttaaatattttagtacataattttagttcccacgtcatttctctaactatattttgttttagttattttctcagtgattgccctggagattataattaatataacaaactactttgaattaataccaacttaattataatagtatacaaaaaccttgtccctgtacaactccattccctccactctccttcaggttgtttctgccacacaaattacatctttatacattttatgccaactgaataagacaggagaaaaaagagctacaaagactacattgatactagctttcatgttaacccatgtagttacctttactagtgctctttatttcttcatgtagattcaagttactgtctagtgtcctttcgttttaacctaaagagctccctctagcatttcttacagagtaggtctgctagtgattacttctcttggtttttatctgggaatgacttaatttctccttcattcttgaagaacagttttgctggatttagaatttttggttgatagtctttctctttcaatctttcaaatatgtcatcccactgccatttggcctccatggtttatatgaaaaaacaattgactgttaatctttctgaggctttcttgtatatgattatttgtttctctctttctggattctctctttgactatggctgttttttttttcaatttgctatgatatgtctaggactagatctctttgagtttatcctgcatggaatttgttgagcttcctgtgtaaattaatattttttcatcatatttggggatgaaatctgattaaaaatagccattatttattcaaatattctttctgaccctttctgtctttcctctcctcctcagattcccattaggcatgtgttgatacatttgctgttgtcccataggctgtgttattttacctcattcttttttctttctgttcctcagactggataatctcaactgatctattttcaagttcattgattcttttttttttttttcgagatggtgtctcactctgtcacccaggctagagtgcagtggcatgatctcagctcactgcagcctccacctcccaggttccagcgattctcctgcctcagcctgtcgagtagctgggattaccggcatgtgccaccacacctagctaatttgtgtatttttagtagagatgggtttcactatgttggccaggctggttctttcttctgtcatctcagatatgttgagcacctccagaaaatttattatttcagttattgtagatttcaactccagaatttctatttggttattttatttatttctttttgctaatattctttatttggtgagacatcattttgatactttcagttctttagaaatggttttgtatcgttctttgatcatattctttgatcatatttaacataactgatttaaagtctttgtctcttaaatacagcatcaaggtttcctcaggaatggtttctattgactacttttccccctgtgtatgggccaggctttcttttttctttgtatgtcttactagatttttggggttttttgtttttgtttttgtttttttacagagtctcactctgttgcccaggctggaatgcagtggcgagatcttggctcactgcaacctccacctcctgggctcaagcaattctcctgccccagcctcccgagtagctgggattacaggcgcccgccactatgcccagctaattttttgtatttttagtagaaatggggtttccccatgttggccaggctggtctcgaactcctgactttgtgattcacccgcctcagcctcccaaagtgctgggattacaggcgtgagccactgcacccagccatgtcttactagtttttgctgaaaactggatatcttaaatagtattatatggcagccatggaaatcaggttcgcctcccttccatgggtttgttgttgttgctgtttgttgttataattgttgtcgttattgttgtttaataacttttctgaactaattatgtaaagtctgttttctttgttgtgtgtggccactaaagtctgtgctcagttagcttagtagacacctactgactggaaagagattttcttacatgtctggaaccagtaagactcccagtatttcccaacaggctctgtgtatgtattggggtatgccttcaacattcaaccaggcagtttacaactctaccttagctgtcactgactgcttgttcagagactcaaggttaccagaggtgagagctcagggccttctcaagtctttcttggacacataaacagccctggacaggcacagagccttacacatcatgcacacagttctctatagattcccaggaatatttcaaagtgttttaaagcccccattggacatcccattccccagttctccttttaaactttttggttagcctattgtttgccccaactgttatgcaacacttctcacagccgtgatgttcaacaattgcctctgattgcttttgccaatctcagagaaaaagttcacactgattgggctttgagccaggtcaaataaagatagccttgtgagtagtatcaaccactggataaatcaaataatgacagttctctgggtctgaggattttaaggtgctccaaatccattctacctcctccagtgactgccaggctactgattttcaccaaaatttggtgctgttggtttccaaacctactacagaactgggtaggggaggggatataaggcaacttagatgctgcagaactcactgttcttgctggaatttagctgttttccttgaaaaggtactccctagatctgctgcaaacctttggttaattttgagttctgaaaaaatttgattctgacaattttggctggcattctcactgcttttaaggaagagaggattttcagaagtctttgccaattttgctgacatctggattgaactttagccttggatgggcttaaagactttgttaaaaccttccctctttgactatcatctttgttgttccttagatgtatctgtttgtctctgtctgtttatgctttgaaattcccaaaaagtatttcaagaaatggctgctcctcatcagggctctcttcagctacaggatagtctgatgaagccggcctcccccaacgctgtggtcagtttcctgcccgctgctcaaaggctgccagcctggaggggaactggagctccacactctgcaatggcgcctctccttcagcaccctctctggtagcttactcaaaatgaacatagactcacagagattccaggaccctaagggggccagagtgaatgtagaatcctttcatttgttcatctattcatgtaacacccattcttgaagatctgctctgtgccctgaatactgtcattgccaacagcaaacacttgtgtgttgttttatatccttgatttcaaatttcctctgctgctggcatgacagggatgacatgatagtgacaatctggattgccttgtgccctcctggggaaattctgaaagccagacaccaaacctgaccctgaaggcaccaaggagaaatgctaaatttggaaacaaccttgggaggtacatagccacccatgagcattttatccaccatttgctgggtctgtgatcttgagccagacaagttacctctctggcctctgacctctgattcctcccttaaaaaaatgggctaattaggtaaatggcaaggactggcccagagtaatgccttacataacagaaattggtctcttcacctgtcctttattctctcctcccctcacctatagttctctgaatctctgaatccttgcttcagaaggctcacttgacagcctctgacctacactctgccccaaagaccatggggctcctcttctctgactggagagggctcacaggctctattgaggcagttatggatggcctagccctgagggggaaggttccagagaccaaagctggagcagctgagcttgaaagtcatggagaaaaactactaataaggatggacataaaaagctagcagataataggctggcaaagcatccactccaggtggcagtctggcttttgtgtgtcctgtgtagtacagtccaggtcataaccccagaccttaggacctgtgaaaagaaagcctgggctgcagcctcaaaggacacccgatcacctagtgagccaatgggggctggactctaaaacccataaggtcagggccagacatgctagggcactctgagcaggaggcttcagagcatctgcaattgtgcttcttcggcaaacttaggtctcttaacacctccacctccccctctcagggtttgaaaactgtagaaaaagtgttggtttccaatgtgggctgcaaagagtactcatgggtgggatgaccttggcaaattatttaacctcactgagtcccaggacccaggcctttaaacatagaagtctactctctgcttcatggcattttcatcaaagccaatgagatggggtggggtgggggtggattgtgcacatggcacagagcttggcacagggcaggtgcccaggaaacgtgaccagcttcttctgcagtcagtaaaccctgccaccctctggccacctcagatttcccagaagagggatgattcctccagccaacctttactgagcactcgcagagctagagctatgtagttatgcccacgcataataaaatagagaggatgcaggggcatccaggaccttctccacattgagaaaagaagatggtaggacacccacccaaagcctcagtaactattccaggaatcctgccctgattccccaagaaaggcgcccagctcctatcatctgccaagatcacgggaccataggaggcatgcttttctcttgcagcttggccatttactacctgaactcagtttccaaaagcctttcccgagctaatgcccagctgaggaagaaaatccaagtggtgagtctgttgggagtttcatcctggacggtaaaaagagatcatgtttttggtttttgctaatttgctgtgtgagcccagctgtgttatctaaatggctttcttctaaaccaaatcccaaaatatctgtattatgggaagtagccttgtgagattcaacagcatgcatttatattattgaggctatttggtgatttgtgacaataatgacttaaatttcaaggggttactaaagaacaggagaaattcagtgagttcagccaatgctcatacagaaaaagccagtatccacaataactcctacaggttaaagtgaatatttaaatactaaaagaaatgttgtcaaaatcacgtatttcttgtgccctttagcctaaaagatctcctgagtccccttcacacatgggaagcctctctcaacatcccagctgacaccctacttctgactgctgtctacacacacacacacacacacacacacacacacacgcacacaccctaaaattcagaccctaaccctccctaagccctgttcttgctttctctgtccctcttctggagtgaatttcatctgtcttgctactggtccccccgtccacaccttcttctggttttttgtttgtttgtttgtttgttttaagatggagtctcgctctgtcaccaggctggagtgcagtggcacgatcccagctcactgcaacctccacctcccaggttcaagtgattctcctgcctcagcctcccaagtagctgggactacaggcgtgcatgcaccaccacacccagctaatttttgtatttttagtacatgtgagccaggatggtcaccatatcttgacctcgtgatccgcctgccttggtctcccaaagtgctgggattataggcgtgagccaccgtgcccagccccttcttctgttaatctcactgggctcctgcccaggtacagaaaaccactgaaatagaggattggaaagatcgctgtcctctggccacatgttccttcaattgctatgtgaatctgagagcctcaggctgccctctccaatcagttgtgaggaccagtaacaggcagtttaagatagacaccaagaactgaaaacaggccgggcatggtggctcacgcctgtaatcccagcactttgtgaggccgaggccggtggatcacctcaagtcaggagttgaagaccagctgggctaacatggtgaacccgtctctactaaaaatacaaaaattagccaggtgtggtggcacacacctgtaatcccagctactcgagaggctgagggcaggagaatcgcttgaacccaggaggcagagattgcagtgagccgagttcacgccgctgcactccagcctgggcaacagagtgagactctgtctcaaaaaaaaaaaaaatcactctcaacacctctgagcctcaaagacccatttcctgggccaggaccaacagttcattatttcctgcagctccgtgaagttgagaagagtcacaaatctgtaaaaggcaaagccacagccagagattcagaggacacacctaaaagcagctccaaaaatgccacccagctccaactcaccaaggaaggtaagctctttgtcataatgattatgttttacaaggccacatggaaaggtgtaaagagcctatgaaacagcgtgaaatcagactgttctgggattgaaatcagaatcctaacaattattagcttatgaagttgggcaggtgaatataggggtcaatcatagcacctgcctcatgggatggtgaagatgagatgtaatcatgcatgtaaagtgcctaccagaattcctggcacagagaatgagccaatgaataccagctggcagtagtgccgtcatgcaccccttaataacatttggatcaaccatggatggcatctacaatggtggccccataagattataatggagctgaataattcctattgccaagtgacgtaactgtcaacattgtagcaaaacacattactcatgtgtttgttgtgagctggtgtaaacaagcctactgagctgccagttatataaaagtctaggccgggcgtggtggctcacgcctgcaatcccagcactttgggaggccgacgcgggcggatcacaaggtcaggagatcgaggccatcctggctgacacggtgaaaccctatctctactaaaaatacaaaaaattagccgggcgtggtggcgggcgcctgtagtcccagctgcttgggaggctgaggcaggagaatggtgtgaacccgggaggcggagcttgcagtgagccgagcttgcaatgagctgagattgtgccactgcactccagcctgggcaacagagcaagactccatctcaaaaaaaaaaaatctctagcacatacaattatatatggcacagaatactcaataatgataataattatgttactggcttatgtgtttactatactatactttttactattattttagagtagattccttctacttatataaaaaatagttaactgtaaaacagcctcaggcaggtccttcaggagctattccagaagaaggtgttgttatcacaggagatgacagctccatgtgtgttattgcccctgaagaccttccagtgggacaagatgtggaggtggaagacagtgatattgatgatcccaaccctttgtagacctaggctaatgtgtgtgttgcatcttagtttttaacaagaaacattttaaaagtaaaaagaaaaaaaattcttaaaaacagaaaaagcttatcaaataaggatataaagaaaaaatatttttgtacaggtggtcagtgtatttgtgttttaagccaactgttattataaaagagataaagtagaaaagttacaataagctaaggtttattattgaagaaagaaaaaaaaaattttttttgagacagagtctcactctgtcacccaggctggaatgcagtggtgtgatctcggctcactgcagcctccacctccagggttcaagtgattctcctgcctcagcctcctgagtagctgggattacaggtgcccaccaccatgcctggctaattttttgtacttttagtagagacagggtttcaccatgttggccaggccgttcttgaactcctgacctcgtgatccgcccgcctcggcctcccaaagtgctgggatgacaggcctgagccaccgcgtccggcctagaaaaaatatttgtaaattgagtgtaacctaagtgcgcagtgtttataaagtctgcagtagtgacagtggtgtcctaggctttcacattcactcatcacccactcactgactcacccagagcaacttccagtcctgcaagctccactcatggtcagtgccctagacaggtttaccatttgtcatctttcatatactctaccttttctatgtttagatacacaaatatttaccattatgttccaactgtttataaagtattcagtacagtaagtgttgtgcaggtttataatctaggagcaataggctgaaccatatagcctatgtgtataacaggccatgccgtctaggtttgggtaagtacattctatgatggtcacacaacaacaaaatcacctaatgatgcatttctcagaatgtatccgcatccttaagcaacgtgtgctatagtttatattctctgaaaagagaagcactggaatatctagaataatagagtgagaaaagtcaacataaaaagttcccaggaaagtatcttggggctattgctcctcggccttttggctaagatcaagtgaaaatatcctggggcttcaaaggggagtgatcatagaccacctcaaattaggagtgaggaaaggtcaagttgaaagagaccatctctgagatgatcccattttccagagatcatctctgttttaaaattaaacagtgtctgcacgcagacactttagccttggatgtaagaagtgaatgagatgcataaggaatgactgacagtttaggaatttgaactttatttttttgagatggagtcacactctgtcgcccaggctggagtgcagtggcacgatctctgatcaccgcaacctctgcctcccaggttcaagtgattctcctgctcagtcttctgagtggctgttattacaggcacctgccaccatgcctggctaatttttgtatttttagtagagatgggatttcaccacgttggccaggctggtctcaaactcctgacctcaaatgatcagcctcaagtgatccgcctcaaacggcctcccaaagtgctgggattacaggcatgagccactgcacctggcctgaactttttttttatacaagcattccaatttcttagtaactggaattttattcattttttattattaagtattcgctataataaaatgatactagctgctgcaacaaagaggcccaaaatggctagtggctcagacaccataaaagttcatttctcactcaacacaaagtccaaactgggtgctttcacctgacagcctcaagtgctgatatggggaccctggctccttccatcttggggctctgcctgcatcaagctagtgcaaggggaagagcttaggggacacacctggatgtggtcccatcaaagcctggaactccagcacaggccacactcatccacaagggaaccagagcccatttctgtgtcccagaacaagagggactgggtttagtaaagagcagtcattttccctaacttggagttagaggaggggaaggaaacaagttaatgaaggattggaaagtagatctgattccaaacaattcccacagcccctccccttccgtcatcacttttgaccccggcagtcaccctgcgaggctgccgttattcttgtcccaattttgtactctagaaaacccgggatcagagagtctagcctaaggccaggttcaaaatcaagttctctagccagaagaccatactcctccaacagatgtgtttatgcaaaagccaggccaaggtgaccccgagacagctgagtgcaatccgacagctctcacatcaccaaataggactaaaacctacacacaccgcagggcgactccagagagctccaatccaacctgtacaaaatctcccacttcctctttcttgtcttggttcgttttccagagaccactcctccctctgccagccaaagccaggccatggacaagaaggcgcagggccctgggacctccaattctgccagcaggaccacactgcctgcctctggacaccttcctatatctcggccccctggaatcggaccagattctggccacgccccatctcagactcatccgtggaggtcagcctctggaaagagtgctcagagacctccccactgatggctaggactccagggagcctcgaccctagggctgatcctcaagtaccccagtttcacacataccaaaccaaggttctctcccctctttcctctcacatacatgctctgtctcctctcttggaatgcatgaactttgattccttcaggcccttgtcagctaccgaaggaggaagacagtggcttcacctgtcctttagggaagctggagccatctctgcactaactgccctcccaaatatcttggttcagacagctctgaaccccacgctcacagtggtcgaccttgcctcccgattttcggagttggggaagggccatgaccaccctcgtagactttttccatgggatacagtttaggacacgggtttctgccagcttccctaaccaggagggggatggagaagggcctacatttctcaatccagaggaagtgagctggtttaaatgaaaggtccaggccaggcacagtggctcacacctgtagtcccagcactttgggagaccaaggtgggtggatcgcttgagcccaggagttcaagaccagcccgggcaatgtggcgaaaccccatccctacaaaaaaattagctaggcatggtggtatgcacctgtaatcccagctacttgggaggctgaggcagaaggatcacttgagcccaggaggcagaggttgcagttagctaagatcacgtcactgcactccagtctgggcaacagagtgagacgctgtcttaacaacaacaagtctggccaggagtggtggctcacacctgtaatcccaacactttaagaggctgaagtgggaggccaggggtttcagatgagcctgagcaacagagcaagacccttgtctctacaaatagataaatgaatcaaagtaaatgaaagtgaatgaaaataaaggtaaatggaccaaagaccagtcatggagagtggggattggtgggaagactggtgataccccagtacccagcccaagggaagcttacaccatggagcacaaaacagggagtgaaaacagtgaatcacaggagcgagtgagttgcccagtgcctcttatcttggaaggaaacctgccttacccagggcagaaaaatctttttcatgcaccaaattctaaaaggaatttgataacatgattattgtacaaaagaccttgaagatggtttctctgaagagttttgcaaaaggtacaatgcagagcgttgtctctggggattctatgttcacttagtgtcatatcatggttctatgcagaatatttcttagggggaagaagccaggggccagaccattaagaaggccttgatggcaagggcagagcctaggtagggtgggagtcacagtccaggactctgcaacagcccagctatcttgcacacagctccttcctttcctccactctgtgctcccagacccaggtaagcagtgaggcctcagagggccccagagaccctctcacccatgtctctgagtgttctaaagagagtcagccaccttaacctcatcaactgttacagccaccacccaaccaggcccccaggggttctcaggagaatcccccagactcagaaagtcaggcaaagccctggcagagagacgaagatttttacagcaatttcataagctgtacaattaaaataatttctaacttccctcccaaatcccttcccttctcaatccagcaccaaaacttcacatatatatacaaactgcaatggaataatagggacatgtgaccaggagaaacaggataaattatttcacaccaatctctcctggcaaggctaacgaagatgttgcaatgcctgatttccatggaacccaggtccaagccccaaatccaaaactgcctgtgtgtcatatgccttcccccaagctaacctacctgaaacctcagtacagggatcctggcactgtaacccaaccaatcaggaccagaaggcccaaagatggccaccacaccaacacctggccttctgcatcagaatgccaggccctgaggcagggaacactctgcctgcctgagccattggtcccctagtgattactgtcaggcctccactggttactaatacacataaatacccaccacaaacacaaaccaaccatcctgatctgatgaagtgtaattttatgtgacggaatgtatatgtcatctaatgctgcataacaaattattcccaaaacataacagcctaaaacaataaacaattatgtattattgtatgtagtttctgttctgtgggttataaatttgggagtggcttaactaggcagatgtggttccggatatttcagtcaaattctcagctagggctacaattattggaaggtctgactgggactgaaagatctgctctcaacatggctcacacgtgactgttggcaggaggcttctgttccttgctggctattgataggggaccttggttactctccatgtaggcctctccatagagctgcttgggtgtcctcacaacatggctgctggtttcccccagagcaagtgatctgagagggagagcaaggaggaagccacaatgcctattatgacctagtctcagaagtcacactatcagttccaccacttttactcatagaactgagtcactaagtctagctcacactggaagggaagggatttaggcttcacttcttgaagggagggttaccaaagaatttgtggacatattttaacagaaaattttctaattcaaataattacaagacctctatcaagacaactctggccaggcgtggtggctcatgcctgtaatcccagcactttgggaggccgaggtgggtggatcacttgaggtcagaagtttgagaccagcctggccaacatggtgaaacctcgtctctactaaaaatacaaaaattaaccaggtgtggtggtgcgcttctgtaatcccagctacttgggaggctgaggcaggagaatcgcttgaacccaggaggcggaggttgcagtgagccgagattgtaccactgtactccagcttgggtgacagagcaagactccgtctgaaaagaaaagaaaaaaaagaaagaagaaaattaaccatttatccagagaaatataactggtgtcctgctgatattaccctagtttggctgcgcattcctaactggagagaaatggagcagatgctggattttatctgttggaagctatttttgtaggctgatcctttcacttctaataacttcaacttccatttctatttcctaagagctccatagtacacagaatcacataagtaggaagacactttagatgaagaagatcaaaggggatacctggtctcccactgatttgcacactcgcagaaactaaggggaggggctgatgcaccagccagtaaggtgatctgggcaggttaccaatagcactcactatggtggtaacgctcagctcagtaaagtcacttcagacgtgctctgaagtgggtgggtagagacccacccaaagctggagcaccaagttcctcatgctcaataatggacaataaaaaataaacccgccatgcagaaagagacatgtatttctcttgaccttggcagaaagtagaggagaaaaagtctccattgagaagttctagccacaaggcagctctcacagagaggctctaaattcatatgctacagttgacccttgaacaacactgggtctaggagtgctgacccccctgcagtcaaaaacccatgtatagcttttgacttccccagaagttaactaatggtagtctgctgttgaatggaagttttactgataacataaagtcagttaacacaaattttatatgttacatgtattaatactgtattcttgcaatagaataagctagctaggaaaaaatgttattaagaagatcatgaagaggagaaaatatatttaatattcatcaagcaaaagtggatcatcgtaagtcttcatccttgtcatcttcatgctgagtaggctgaggaggaggaggaggaggaagaaaaggggtcggtcttgctgtcttaggggtggcagagatggaagaaaatcacatataagtggatctgtgaagttcaaacccatgttgttcaagggtcaactgtatctgtatgttccaaaaaactcaaatgaaaattttaatttatttttttcaagactttcaggccaggcgtgatggctcacacctgtaatcccagcactttggaaggccaagacgggtggatcacaaggtcaagaggccgagaccatcctgtccaacatggtgaaaccccgtctctaccaaaaattcaaaaatcagctgggcatgttggctcatgcctgtaatcccagccactcgagaggctgaggcaggagaatcgcttgaacccgggaggcggaggttgtggtgagccgagattgtaccattgcactccagtctgggcaacaagagcaaaaccccatctcagaaaagaaaaaaaaaagtggcattaggttgatagtgcctccaaaacaggaagaaaaaaggcaaataaacaaaaatagcacaacaaataaaatataaagcacataagacgaaagaaataaaccaaaatatatcaggaatcaaaataaatgcaaacggactaaacttctagatagaaggcaaagactatctgatggagattttaaaatcctataagctgttcccaagagatgactttaaaactaaggatagaggccaggcatggtggctcatgcctgtaatcctagcattttggaggctgaggcaagtggattgcttgagcccaggagttcgagaccagcctgggcaaaatggtgataccccatttctacaaaaaatacaaaaattagccagtgcatgcctgtagttccaactactcggaaggctgagatggaaaggatcgcttgagcccaggagtcagaggttgcagtgagccgagaccacaccactgcactacagcctgggtgacaaagtgagggaccctgtctcaaaaacaaaaataagataggaactttatcccttttgattcctagggaataaaaactgaagtataattttcaatggcaaaatcaccaggtgtgtgagtaccatcaaatattctaagcaggtttgtttatagagtgtgaggattgctattaaagacaactgtctgcagtgttgtgccagatactttatctttcaatatagtattagcttgaaaaacatgaagaaaggcccaaggtcatagttggggtagatgtggtatatagagcatacagataactctatcactgaaccgcgtctggaaaatgggctatataaaaccaacctccaaatttgtctgtgaagattcaacaagttgatggaagtaagactgtaatgtgccaagcattatgctaagtactcaataaataacagatatcatcacaggcatggataagatctaacatccttgggctcaggggataaacacaacagtatcttgtgctctataatcctaatcaatggccaggcttcagaagctgccaggtcatcactgccaaaaaaacacaaggaatgctgggctaaaccaccttcccaaggtacttttcattctcctgtgtctttataaagaaatgctgcatatacatgtaactcactgccaaagaatattgtagggtttctttccacttttgagaaaagagcccaggaattgctagcaagccttttaaattttatgagaattttctcactcacaaaaggagtataaagtgccgccctcttgtggtagtttcatgaaatttcctttcccgaagctctcccaaggcactgaatttattttatttatttatttatttatttatttatttatttatttatttttgagatggaatctcgctgtcgcctaggctggagtgcagtggagcgatcttggctcactgcagcctccgacttccgggttcaagcgattctcctgcctcagcctcccaagtacctgggattataggtgcccaccaccgcgcccagctcatttttgtatttttagtagagatggggtttcaccatgttggctaggctggtctcgaactcctgacctcaagtgatccacccacctcggcctcccaaagtgctgggattacaggcgtgagccactgtgcatggcctggcactgaaactgaaatagcacattccacttccataggtccccattagtgttgccagagtaaaaaccttgggctaatggacaccaaaatgacacagttagccataggctgggctaaatgaaaaaggtcagatgatatagtatatggttcttcccaatgggtgaacagtcttatggacagagaaaaagaaataggccccacctgccacctggctttaatgtggaacctggagcacatctgggaaactcatggctcccactcagacctgctgtccctgcaggacatttgctcagtgggagccctgtgagcaatttgtcctccatatcacctccaaattaatctccaaacactgcttaatggaaaagcaagagtctcatcagaccaaaaccactcatcctgactttcattcaaggtttcttacattctagatccttcagtcttttgtccaactactgaccagtttgcattttacacctctagcaggttcttctcttgtttctggcttttgcttccactctctttccatcctccatctctaaatgacctacacactcttctatgaatagctaaatcccttcttgccatgaagtctacctcaggaacactgggccaaattgtcttcctgtcagcttgcatacaactgcatcttagcacctgattatattcagtctcccaggattgcaaagtctctgaagtcaggggtcacaggttagtacaagttgagtatcccttatccaaaatgcttgcaaccagaagtgttttggatttcaaattctttttcagattttagaatatttgcataatacttaccaggttgagcatccctaattcgaaaatccaaaatctagaacatataaggagctcaaacaactctttaaggaaaaaacataataatccaatttaaaaataggcaaaagatctgaatagacatttctcaaaataagatatacaggccaggcatggtggctcatgcctgtaatcccatcactttaggaggccgcggcaggcagatcacctgaggtcaggagtttgagaccaggttggccaacatggtaaaccccgtctctactaaaaatacaaaaatcagcagggagcgctggctcacactttgggaggctgaggcaggcagatcacaaggtcaggagtttgagaccagcctggccaacatggtgaaacctctctctactaaaaatgcaaaaattagccagacgtggtggctcacgcctgtaatcccaacacttagggaggccaaggcgggcggatcacaaggtcaggagattgagaccatcctggctaacacggagaaaccccatctctactaaaaatacaaaaaattagccggatgcggtggcggtcgcctgtagtctcagctactcgggaggctgaggcaggagaatggcgtgaacctgggaggcggagcttgcagtgagccaagattgcgccactgcactccagcctgggcgacagggcgagactccgtctcaaataataataataataataataataataataataataataataaaataaaataaaataaaataaaaatacaaaaattagccaggtgtggtgccagacgcctgtaatcccagctactcagaaggctgaaccaggaagtggagcttgcagtgagccgagatcacgccactgcactccagcctgggcaacagagcgagactccatctcaaaaaaaaaaagaaaagaaaacgtggtatgtatacacaatggagtactattcagccataaaaaataagatcctggccaggcacagtggctcacacctgtaatcccgatactttgagagaccgaggcaggtggatcacctgaggtcaggagttcgagaccagcctggccaacatggtaaaaccccgtctctaccaataatacaaaaattagctgggtgtggtggcacacacctgtaatcccagcatttggggaggcagaggagagcaggatagctcaagcccaggagtttgagatcagcctgggcaacatggcaaaaccctatctctacaaaaaaattagtcaggcatgggggtgtacaccagtagtcccagctacttgggaggctgaggcaggatgatcacttgagcccaggaaatcaaggttgcaatgagcaaagattgtgccactgcattccaacctgggctacaggagaccctgtcccaaaaaagaaaaaaatgaggtttcagtagcttctatgcaaggtgataactgcagagaactgagactcaactgaaaataggtgataaaacattttgttgtgctatttattaattaaaggacaaaagagcaagatgaaagaccactaatattttttgagctcccactacatgccaggtacaccattgtcacacctggcccacaggagatcttcaataaatgtttgttaaagggatgaatgaaaccccaaccttcattctgcaaaggaaatgaaagctcaggaagattcagtgattaagatcacattgtaagtactggcagagctggggcttgaacccacgtgagctgaccgattcaaatttactgctgcttaacaactcacccttacatttagtggctgaaaaccgcaatgtactatttgtcacaatcagggtagacaagatgcagatggtggttctgctggtcttgtttggggccttacatggctgcactgagatggtgacaggggctgggacacacaggatggcttcacccacacgtctatcttggccatttgtggaaactaactaccataggtggtatttcatgaccctgtaagcacccacaaattgcacctggttggatattctgccttagaaagatcattctggcagtagaaagtgccttgaaggggaaaccaaaggttttgtaaaaagtctactttggtggtgaagacctgagcctagacaggagcagtgcacccagcaaacagtccaagcggaaggcaaagatggtctactccaccacaggttgcagagatgccccctggataactggataacagtgtcaaggataacaggagtcctgtgttatcccactagagtcagactacaagtatcagggtgagatattttattgaagggatggagatgagaaaaccgaaggaaaccttttaatgttcataccacatccatatctgatcacaagcattggttatctcaccagcagaagcacttttcttcagccatctctgtaagtcagcaaactacttcatgacagctcctttgtaaccagaggacccaaatttttccagagtacgactggttaccttttggctcattgattgaccctcaggttttttatattctgatttaacacacaaaagtgtgttcatatagttacatatatatgtatatatgaaaaatatttgtgtacatatttctatatatgtatgtagagctgagacaaaagttttacaatgaacagcaccttactctaagcaacacactcttatttctattcgctttaatcctttttcttttttttttttttttttttttttttgacagagccttgctctgttgcccaggctagagtgcagcctctgcctcccgggttcaagcgattctccttcctcagcctcccgagtagctgggattacagacatgctccaccacgtccagctaatttttttattttttggtagagacggggtttcaccatgttggccaggctggtctcgaactcctgatcttaagtgatccgcctgcctcggcctcctaaagtgctggattatagcccacccaatcctatttttttaaatgctgtccattaatgcattctgacttcttgcttgaaaacccctggtttagtggataagcacctgtaactccaggaagattcaggattaagggcagaaataatgaagtaaattgaagtattagcattagtattttccattacattttggaatcgtctattttgatgtattcacgacggttaaaataatttaacatgctaatgtatggattaacttggcaattccattttaaaatattaaatggaataacgattctgactcgtaagtagacatgtgtaacagaattcaaccacatctgtaaaccatattgaaattatgagagtaagatttaccaaccacatttaggtttgacatattagatttgtgagtgaactatgtacttggattttgtcaagtaactcaatcgcttaacaaaataacaattaaatgtataaatgcagtttatagctatacattatttttaaaaatccccttcgaatgactctttaaaacataccaggggatacgctacttaagtataactaggttttggatttataacgttaatattaattattaaagcaaaactcatttctaaagagtcgcctgagtgcccaaaagacgccctcaaggacagggaagcagctgcgattcactcagcgatcaccagcgcccagaattcagggccgcccaagcggaggagcaacacgtggcccagcaaaaggagctgggtcccgtgcagcacagcaacaagaaactggcctaggaagacgctggagcgtctttctttcgcacgttactgcctgctacagtcatttaaaaaaaaaaaaccaaaaacaaaaaaaagaaataaattaatagtacgaagaaaactgcgcgagctacattcccagcagggtctgcgccagagcgcgccaggcaccgctcccgttacgggtgggaggaaaggatgcaccgcccacccggcgccggggaggctcgtccccgagtaggggacgggaacgcctgggtcccggggacgtggggcgcagggtctggggcccgaggccacggacgaagcgggaagccggctaggcagcggtctctgtctgggatggacgccgcgccccacgcggacctcccgccccgacttcacccagctctgctgcccgtaactcatatgacaagaacatcaggaaccggactattaccccgaaagggccttcccaagtcgtttcgccgcctgcagtgcccgaccgggggccgcgcgtccccggcaaccacgcccgcccgcgcagctgcagaggccggaaaaggcccgctcgcccgcgctcggcaccacccagcccgcgctccgggcgataccaccctgggcggcccctccaaaggccggagatggtgtcgtccccggcctccgattggtcgggggggcgggggcgtggcctctggagcctggttccgcgcgccggagcgcgctagccgcattgcgagccgaacccgggagctggcgccatggtgaggagtggttgcggggcgcgggcgacgcgacggtgggggtttcggcctgcgttcgggccgcagacagggcctgggcctgggcctgggcctgcgcctgcgcctgcgcctgccctgggaacgggttccggcagacgctgaggttgcgttgacgctcgcgccccggctcccgttccaggtgctgttgcacgtgctgtttgagcacgcggtcggctacgcgctgctggcgctgaaggaagtggaggagatcagtctgctgcagccgcaggtgggtgagatccgtgggctcctttggcggccccgcagaccctcatcgcgcgggtcccagcatgcacagcgcgctcccacgtggccggccgagcggttcggggcggggggacgggcctggaaagctctagatccgggggtctttaccttgacccatgggtagaatcgctctagcaattagaaataagcctcccggacgccgcccccgaacgattaaagcagaagctgggatgtggggcccaggtatcagcatattttaagagcttccaaggctgagaaccgctgcttgactgcgccgcagaggcaggagggagggaaggaaaccacttagcctctttctccccccaggtggaggagtctgtgctcaacctgggcaaattccacagcatcgttcgtctggtggccttttgtccctttgcctcatcccaggttgccttggaaaatgccaacgccgtgtctgaaggtaagtcggccaccgccaagtgtcacagagagatgtggttcctttcggtatcctctcgggcagcttgtgatagtatttgccgtccttggctggctctgagtctgataggcgtgaggcagtatttgagccatacaatgtgtaatttgaaataattgtcttcacagagctcaaggtctgggaactgtgctagaccaaactgtttaagcagacgatgtggaatgtgtgttaacgtttccttgtgggcactgtagtgacaaactattttttatttttattttttttgagatggagtctgtcccccaggctggagtgcagtggcaagatctgggctcactgcaacctctgcctccctggttcaggcgattctcctgcctcagcctcccgagtaactgggattacaggcctgtgccagccaccacacccggctaattttgtatttttggtagagacggggtttcaccatgttggccaggctagtctccatctcctgacctcgtgatccgcccgcctcgacctcccaaggtgctgaggttgcaggcgcgagcgacggtgcccggccgacaaaggggggtttcttaaagggggtcggcttaacacctacttgtgcctgaggttttgcctaaacacaatcaagtgtctggttctctgctttctgttcgattggaaagggcagttgggtaaacacaggctgagaaaaaaaggtttggttccagaaggcaaattctacgaaatactcgagggtgtgttacaagctattatttattgcccacttgtgctatcagacctgaatgcagttgttcccatggctgggccaggctttgcagtgatgacttgcgaatcaaatctgtcaatcccctgagtgcaatcactgatgtctccatgtctctgagcaatgcctgatggggagggatctaggtatgccatcccagcgtgctcggtgggaccagggtagtcagctgagggatgttagagttgatcgtccttcagcctgttagtgggaactgtgttctttcccctgaggggttgttcatgaggacctccgcctgctcttggagacccacctgccgtccaaaaagaagaaagtactcttgggagttggggatcccaagattggtgccgcaatacaggaggagttagggtacaactgccagactggaggagtcatagctgagatcctgcgaggtgagaccatcatctgttatattcctgttatcctggacattttgggggaggaggttctggaaacttggttgcttgttgtgatttctgggaaggccttcaggctgggctggtgcccgtgggtgcgggagctagctcagagccccttgttgctcaccgtcttgccctcttcttaggagttcgtctgcacttccacaatctggtgaagggtctgaccgatctgtcagcttgtaaagcacagctggggctgggacacagctattcccgtgccaaagttaagtttaatgtgaaccgggtggacaatatgatcatccagtccattagcctcctggaccagctggataaggacatcaataccttctctatgcgtgtcaggtaaagtgcaggggccacccataatactggagcctttggtctgtagttcagttaattttgagtcttgatgaggactgaccatcctgtgggtagaaccatgtgggctggggctgggtgtaggcctcctggtgcttaccacaggctgtgttcttacactgactgtatagaaagaggaggtagagtaaacctaccccatatacacctcagctcaggccctgtgcctggtctgtattgtgaatgggggaacatagaattgaggaagatttggatctttgtcccatttcctccaggcagagtaggtgtggagaaggcaaggctgtagctctatggtttttgatgaagcagctgggccagggagtgactgtggctctttgcagggagtggtacgggtatcactttccggagctggtgaagatcatcaacgacaatgccacatactgccgtcttgcccagtttattggaaaccgaagggaactgaatgaggacaagctggagaagctggaggagctgacaatggatggggccaaggctaaggctattctggatgcctcacggtcctccatgggtcagtgcagagcctggcaacctgcataaggtatggggctctaaatagctggcctcttgcattcacacttggtttttcctaggcatggacatatctgccattgacttgataaacatcgagagcttctccagtcgtgtggtgtctttatctgaataccgccagagcctacacacttacctgcgctccaagatgagccaagtagcccccagcctgtcagccctaattggggaagcggtgcgtcacaggggactcaaaaatgggagaataaggactgttgccatgtgcacctgcactgctgtatttcgtgacccaccatgtcttccctagttgtgcttgatggggaggtggggagcagggctgtcgtgcaactgggcaggtcagcagttcatttctctgactgcttccttgactctctctccaggtaggtgcacgtctcatcgcacatgctggcagcctcaccaacctggccaagtatccagcatccacagtgcagatccttggggctgaaaaggccctgttcaggtaccagtgagggcacctgcccacaatcaggtgccacttctggtgcccactgcttgttgggggatcacggtgatggctgaccagggctccctgacctatacaggcctctgctatgggggtgatggccagtcctggtgtctgagtgattcccagggcccagcaaagggaccaagtttccaggtcagcgacattggatgccttccctctgcctctgggagctatgggttggcatgcattggggtagagatccaatctggcctgaggctcactcaggacttcggggtgagaggaggggaggagctgagctgccttggctaatggggttgaaatttctgatcttaaactctccactgaatattctctcagagccctgaagacaaggggtaacactccaaaatatggactcattttccactccaccttcattggccgagcagctgccaagaacaaaggccgcatctcccgatacctggcaaacaaatgcagtattgcctcacgaatcgattgcttctctggtatgggtgggggggcgttggcaggtgtgagaaggggctgggtggctgggtggggaggcttgcaaccatagcttccacaatgatggcaatatttttcgtcaacagcagttcacctagtgagtgttgagactctgggtctgagtgaagctgagggtagagggaacacagggttggggtagtttctctctttgggctgacaggctttgtcacccacacacatccagaggtgcccacgagtgtattcggggagaagcttcgagaacaagttgaagagcgactgtccttctatgagactggagagataccacgaaagaatctggatgtcatgaaggaagcaatggttcaggtcagttgggctttgctgggtgtggagtggcatagctagctgttggaggtgatgaactgtctgagcctgaccttgtagaatggaggcaaaaaaactgatttaatgagcctgatccaataaagccagaaaggagtcctcagagcaccagaagtcttcaggcccttttagcacttttctttgaccaggcagaggaagcggctgctgagattactaggaagctggagaaacaggagaagaaacgcttaaagaaggaaaagaaacggctggctgcacttgccctcgcgtcttcagaaaacagcagtagtactccagaggagtgtgaggtcagtaggcagcacggccctggcagagatcctaggttgtaggattttcaacagcagaacaaaggatatgctgcatcaagctgtggtcttgagtccaggcttttggactgaaacaaggacctgaaacatctaaaactacctcttgattctataggaaggagataggtgctgaacttgctcaagagcccagagagctggttgtagctcacacccgttccctgggcatgtgtgttctgtcctcggctgcctcccaggagtcctcaacctggggtagtgtaaattcctgctctgcttattatcagacgtgtgtccggaggtggtcgtgtttcacagtggggatgggggcagggaggtccccaatgtgctaagctacaatcattctccctgagattttcatttagcacccagtttcttaaacagtgtttcagggccctgtctggaacttggcatgatggttctgttgcgaccagcatggtgggtgttttttaggtttttttttttaatgggctgaggtaatttctcatgacatgttttccttctaatttgggacagcctttggggtggatttctaaagttatacccacacaattaaactatcccagaaacactgggcaatgttaacgacacgcgttcccctgccttggctacttaattgctgaagatgtaatgagcactgttctcacagcctgttcccctgtccttccctttaggagatgagtgaaaaacccaaaaagaagaaaaagcaaaagccccaggaggttcctcaggagaatggaatggaagacccatctatctctttctccaaacccaagaaaaagaaatctttttccaaggaggagttgatgagtagcgatcttgaagagaccgctggcagcaccagtattcccaagaggaagaagtctacacccaaggaggaaacagttaatgaccctgaggaggcaggccacagaagtggctccaagaaaaagaggaaattctccaaagaggagccggtcagcagtgggcctgaagaggcggttggcaagagcagctccaagaagaagaaaaagttccataaagcatcccaggaagattagaatgcaaatggacattctctgggaggtggggcataccatagcccaaggtgacatttcccaccctgtgccgtgttccccaataaaaacaaattcacaagagttggttcatgttctttattgaacaccttacatgggtatggacagggcctatgggtggggcaaggcagcaatgacagcctcagtgaagtcatggcaagtagcatagccacccatgtcagaggttcgaacctgtgggggagaatcatcatcatccatgtggcctgggctccatcctaacaatccccatcaccacccaacagtctgtcccctaaggaagccggcccaaggacaacctaggctctacccagcaaggtgaccatggtccactgcttagaggcacaaggtctcttccctggtacactgcactgaagggtatggggagtgtggtccttgcaaggttggaagaaataaagggctctagctccctttagtctgcaggtgaccgatgacagacttgatgaagtcggttgtggtgctgtagccgcccatgtctcgagtccgcacctacagccaccaccggcaacagccgtggggagggagaaaagagagcccatgaagggaggtagggcaatgtgattgaggaaatggaagccaagaatgcgtgacagccagaaaaaaggcaatgcacaggaatggaaggaggagccaggatgggaagcacatggacctgccactcctcttaagccactattagctgtgctgcagccagggcaggacaggaggctgagcaggcaaagatgatgggaaacgcagatcagaggcaggatgtggctaccttccttggaagaaatagagacaagaccaggtggaaggaaagaatcacagcgaaaaggagatggggcgtgaaggtgaagctgatgcttcagcctgcctgtatcccttgctgttccacccccaaggagagctgcaagttctgcattcagatggcccatgaaaagggcagtggatggagcaggaaagagggaacagcagatgggatctaagaggcaaaagagatcaagaggatgaaacagccaagagaagggagatgaagaacagccctgagagggatgcagggatgtcagggagcagatgttctggggacctggggggaaaggagacccccattcaggttccccagagggtagtgccgaggtgctgacaccagaactactctaaatcctgaagccagcactactcttctcaactcaccttgccaactttgatcaccttcttcaccgcatctgcgatcatgctggagtgatactcaagactgtggatatggacaggaagaaactgtgactcccccaagacacctcccgctaatttccccacctgctcctcctcacgacacccaacctctgccgacagcctcccatgacctacttaagatgccgcagcatgttggaagccgacagcagcatggccgtgggattggctatattcctgcccactgcctgggcaaatgggtgccgggcaccctgtggagagaggggcaggctagacactgggaggaggcaggaggggtatgcagaggcttaggttggaaaaggacattatgggagggggagctcaggccagggtcactgaaaagaggcatggtgggcagcgtgggggaagaacaggccaagatcacttaggaagtggagatattgggatgggagaggaatggcggacttgaggtcagaggaagggccgagggagaaagcagcctcaccgtctcaaagactgcgtattctgcactatagctctcaccagggaccacaccagctcccccaaccaggccagcagccagattgtcaataatgttcccatagagattgggcatcacaagcacatcaaactggtaaggattctgcaccagctagagggtgagatgcaggcatgaagtaaattccactccccaccctcctcctccgccccatgagtagagatgtggggaggcctcacctgcatgcagcagttgtctatgatcattgtctcaaatttgattttggggtacagttcagcaacttcctcacagcactgcaggaacaacccatccccaagtttcctgtccatgggccaaaggggacagaatcagccaagaaagtacaggggctaccttcccaggaacccatcctacacaaagccatgcccctcacatgatgttggccttgtggacagcagtgaccttgccccgccccttcttggtggcatagtcaaaggcgaactttgcaatccgctgagacttggctcgtgtgacaatcttcaaacactcaatcacaccccttgcactctgggtaagaagaaagcagcagctaggtgacactgggaagggaaacaaggagctccacctctctcccatcttcatccttgccctcccccagtttctggggcctcacctcatgttccagagagctgtactccccttctgtctgctctcgaatgatcaccaggtctagattgttgtgccgagtcatatacccaggaagtgacttcacatggactacgttggcaaataagtccaacttacgcctgagggtgggcagggccatcagctctgctcctggtgccctggcacctctcaaccattcaccccacccagaccacctacctcagccgcatatcataggaggctagctcccccttatactccatcggggtatgaatctttcctgtgaaaacaaagtgggaaaaggagtgtcagccacaggccaagcccaagggaactcagaccagtgtctaacccccttaggaacatcatgtaacccagactcccatctcccattcccacatcagtaaacttttaaattgtctctgggggcaagggacaaaagagaataatgtagttaaagccagaaacatttcatctattgcattttctgtgtgtgtgtgtgtgtgtgtgtgtgcgtgtgtgagagacacagggtctcactctgtcgcccaggctggagtgcagtggcacgacctgggctcactgcaacctctgcctcccaggttcaagcaattctcctgcctcagcctccccagtagctgggattacaggcatgtgccaccacacctggctaattttttgtatttttagtagaggcagtgtctcaccatgttggccaggctggtctcaaactcctgacctcaagtgatccacccgccccggccttaatgctttatttttagtcaacatatttaatttatgttgaaacttcaaaacggagaacagattttttctatttatcaaaaaagagcctgggtttaacaacaagttgaaaaacaatgctagcagatctgtgatctttttatctgtgccttctccttatttgacattttttaacccaacacctactgatgaatatcaattatatgtcaggcaataaggataacaactaaaaccatacaactcctgcccttgagaagcaaacggtacactgggaaagacagaaaatatgaaagacatgataagtaccatgggaaacttgcatagcaacacaaa

SEQ ID NO: 5701 - DNA, 76257 bp, Homo sapiens
  JAG1 gene - 10566334 - 10602590 of chr20; NCBI Entrez Gene ID: 182; Build 35; sequence includes 20,000 bases upstream of initiation codon and 20,000 bases downstream of termination codon of the gene
gaaaaagtcaagtcatacactgaaaaaatatattgtcaatgcttgcaatgatagagtcactctacagataatttgaataacttacacaaaatctgtaagaaaaaacaacccacaaaaaaaaattgacaaaacatgagattcactgaagaggaaattcaaacgtctaataaatagcttctgtaaagtaatcagatgtacagaatggaacaaaataccatttctcattcatcaaaaactggtaagaaaaatggttatgtgtgataacagcattagaagaatatgaaaccataagacacagaattgttacatagtgggaggattgtaaatcgctgcaaccattggggagaaccatttggcagcagctaatatatttgaaggtaaatgtatgcagcaacccaaaattccgctccgaggaatataccccaggtaatgttcctagacaatgctaatgctgcttcaaggggcaagttactaaagattacctatggtagtaatggatggccaactcccctttctcaatggaggtaacatatgagctagaagctcaactaaatgtccacttaacatttcaaggtctttaaaaagaactctaccaccaagtattcattccagtggttctcaaaaaataagacacttaacaattctggtaattttgatttttaaatagtgagtaatagcatccaatagtgttctgtgtcttcagtagccacttagcacctcacagtcagaacacagatatgatttaaatgggcttaattcccaaggataaaatatcataaaagtgattttttaccctgctaactatgatccaattgagagtttaccccacataaattttaacatcagggaaaagggtcatctgaattaaaatgtcatcataccaacagttttacatctgtgtctcacctgagaaccctggtaaatagaaccaggttttcaagaattaaaaaggctcagcttttgacatgaaatgcttagagaccagggcaatttagattccacttttacagccaaatggattaattattctgtccactttataccaagaaagagaagcagaggcaactgcaaaaggaaaactaggcaagatttccaacaaggggcctatcttttgtcctttgcttttagtggcttccaatgtgacctattaaaggtatactcttggccccaaaaaaggagaaagaaactatagctttgtattcccaactcatgtatctttgcttgcaatcttgcattcaatttcagtgtaatatgaagaggcctattcttttacaaaaagttccctcttcccaccaggcttgtttgttattttatgtgtttctgcatcatttgtaggctttgctttgatctgcattcctcctggatgtggggtttccttttcagctaccaaaaggaaagctggtctgtttgaaaatctgtttatttggattttttgctagcctaaagttcctatctttatcaggatgcgcagagctccgtgtctgccagccttggacatcactagttttccctcaggaaaaggcaacttggaaaaaatacaacttgcccgtctgtatttggaatactctgggaaaaaggttttagaggtttcagtttaaaactttaggaaaagattctttaccagatacatttaatcagcagtggctttttcatgtttagactgagaaaaaattgttgcctctctcaatatttgtcaggaattttctcagcaagtaactgctttcttgcgtgcattgccaactgcatctgcatttaccagcaccattcaaagagaaaggaaacacaggaccgtgtggcacccctctccccatttaggccagcatggtcctgtggatctggggaaaaagaaggccccaaaaagcacatacagttggcaatatcacattatcactgtctccagaatattttccttttaaaagaaatgttggccgggtgcagtggctcacgactgtaatcccaacactctgggaggccgaggtgggtggatcacctgaggtcaggagtttgagaccagcctggccaatatggtgaaaccctgtctcgactaaaaatataaaaattagccaggtgtggtggtgcacacctgtaatcccagctactcgggaggctgaggcaggagaatcacttgaacctgggagatggagcttgcagtgagctgagatccctccactgcactccagcctgggcaacagagcgagactccatctcaaaaaaaaattaaaaaaaaaataataaaaataaaagtcaacattcctccaacagaaatgtaagaataagacaaataataattctaaatagaaaagccaacacttgattcagggatggctcctaggttgcaactagcatctcagctctggttgctgggcaacggctgcatgaagaatgtcaagcatatcaggactccttgggtataaggatccatggccaagtgttagggacacctttcatggcatgaaagtgtgtgtcacatatagggtgggatcagctgaatgcatctaaaggcatgttgctggtgctgtataactctgcttaaagtgtgtttcgaggatggggtggattacttgttgaggacagggtcacgggttatttaaagcaacccatagtctacaatgtattacctataagtgatattggctccagaccaacatttcttcctaggaatagttcttcttaggaagactgaaaccgtctatagacaaaacatagggaggaaataaaaaggctctctgaatggagaagacaggagacattctctcacatcctccaattgcctctttgagggagaaacaggatgtgttccccaaggacctcacgagacagtcaacctcacggatggcagtgctcgggaccctctctttggagggttagccagaaggattcaacccgggaatccaaacaaacttaggaaaacaataggcaggaccaggaaggaatgggaattatttgtctgtttttaatagaatcctgccttcaaattgcagctttcctctaggaaaaaaaaaaaaaaaaaaaatcacagctttctttaaagttaaacatgaacagtttctggcctcaaaagatagagatcaaaataaactccagttgttgtctaagaaccacctcttttgcaaggacaccaggcctcactcaatttaggctgccttgggacaggtggcaaatccacagaatggaactagttagataaggcaattccacactgaggcttctcagaggaccaagcaattacaaatcccaaataggaattaagatggacttgtttacaacaaactctgggcggctctgatttcgcagtttggccatccatagggagacctttgagtctctgagaaccaacagaacctttcacccccttcagttaccaaaccccaaaagtccacatgttggaagaaaccaggactattgttaaaccagaaggttttgtttcggcagaacatttagattgcattttattcctttaaaaaaggcagttctagcatacgtgtaagtgctatttgtgaggtagggcaagccgaattgaggatttcatcctggcagatcaggaagaaacaaaggagcccttgtggaaagttttggttttgagactcaaacttcaaaggaagctcagcagaatgaacaaattgtcaaaaagatgattgttaggaggaggatgtcttctttctcaaaaattccccaggtgcaaaaaaaaaaaagccattggcatacagactttaaataatttacaaaattttataatacatctcaccctcatcttaccccttcatgtctcttaagcttagatggaacacaatacgcaatggtggccctccttagaagaacgtgggcatcatagactctgttttccataaaatctcttccaaaaagaccaatatttgagtcctgtttaaaaacatctgctgagaatcccccatctgaagccagaatcccaactaacagcccctggataatttactaaagttaatcccctcccctaggagataagcaaacgcacacactcaagaatcctgagggcagcaggggctgggattgcagggtggtcagatcagggctactcaaagtgtggatctcaggctagcagccatagcatcaactgggagcttgctaaaaggcaaatgctccagccccaccccagactttctgaatcaaactcttggtagggggagggatgaaaatctgtttaacaacttctggaggtgattcttaatggagacttcactgtgacaagcattaagctagagggatcataaggaactatctagtagctctctgagaggtcagccccagaaggactttgaaaacagcaggaaggacattgagagagggcagttagaagagagtgggtgcctaggaccttggaatggaaagggagattggcaatcatcacccgtgccttggtctgaggccataaaaccaacaagtatacattacctttgatcttgggaggaacatcagacccttcctgccacccttctcatttttcctgccatgcaaaggaagggcagcctatattttggagaagtttaataaatattgcctgccagggaattgagattttcatgggggttcaagggccacgaaacctaaagaagggtctcaaatgagagcgggttcttcactaatctaagaccatctcgatttcaccctcagcagccccttcaactctatggcttatgacctactagcaacctctcaaacatacaccagtgctctctttctcctcactcatctccgtcctctttcccaggtgcatccactcaagcccaggactcagctctctgtcactgagtgtggcctggctgcccacccacactattctctcatgcagagccaagcttcatctaagacttagtgttacagctactcaagaggtgttcacttcaactcatcaagtttttaactgagcaactattatatataacctgctgcttcactccctggttaagttctacctcccttcctctgaaaatgccatgcaagcacaaactttgtcacagataaatgaagcctttgagagatcaaatgttccaaccataatgtaacggctcctttggccttagtttgtgaagtatttttatgatttttagttcctactctgttcattcagaacaaacttcactcacttctcatttccctataccccttggttgaggctgaccataggtctccattctacaccaaaacaatgatgactatgctgaagataatggcagtggcaactcagacatgtggtgagctcaccatgtgccaggcattgaactaagcattctacatacattatttaagtttcccagccaccttataagaaaggcactattattatttccactctatggatgaggaaactgaggcttagttacttaactgaggcaatttaagtaacttgcccaagattccagagctcagcagtagcagagctggaactttaacccaagtctatctgacttttattctttatgctttcttacctccatatttatgaggaaataatgtgaaagtgattttaacctgtaaagcactatctacaagaaacgcatttttctaaggactctcctgctctttctggtccctccattactcaaccgtatttcctacttgacaagcgtcagtgtggcattttctcagtttctctctcacacaactccagatcccagtcttatgtgtcctacagcttcctctcacctaactttcctggaccatttcaccgtgagacacacattggatgggccctctgcgaaagagaaggctctggtaaagtcattaattcagtcacatgcttagtgcatggtttgtttagctagaacggcaggctttaaccttagctacacattggaagatttaaacagtctcagtgcccgggctgtaacctagaccaattaaatcaggatctctggggggtggggcccaggcatcaataatttttaaagttccctaggtgattccaatgtacagctaaggttgtgcatgttgactacgggtttaatatccctgctactgctctgatattttttcatgtactctgtgattacaaagccctttgggatagactttacatttgtgtttctccagtatgcctcatggaccagcctatgtttaggagaagtttaataaatattgcctgccagggaattgagattttcatgggggttcttaaaataattttttgtataaggaagtcgcccttaattagccatctgggatcatttattctccaaatactgtttgggtcccgaaacaagccagaagaaatttattctctgaatatggatgaaattgcccatgctcttttgctttctctgtaactggtggagctatgaaactcttacggggagtcttctcccagcctaaaaacacctgagaaggtcagagagcatgtttccagtgatgcatatcaatgagctctgcaataaaagagagtagactgaacactcattctggatatagctttacagtatcttatgtccaaatttcttaaaatgaaagaacttagctataagatctcatacttcttggtggcaagagagagaactaaaatatgtggccatgattggcaacagggtaaaatggttgtagagttttcttttgccatgtgtaggataaaatgtaaacaatctggtagatgtttaagctgagtgatacataggtaaaaatccactccaaaccccttgaaccatctctactttacctctgctcttttgctccgttttctgaagtgaatgcaccttcaaagaaaacccaattgtgactttaccttgaagattttattctgaccactttcaaacaggggttatgagtggaagcttctagattagggaagagtcagtttcctaaatagaatgtcaaatcatgtgacacctttcatctgctttccaacacatgaattaagcccaggtttacctcagccgaccacacctcagcgagagagagcgaagaggattttcaacaggattaaatgatatgaatagctttcaggtttccactgggggcagagctgggggcggggtgctgccgcagcagctgctcagaaaagagaataaaggattttctggagctttgcgactccatgtatctgctgaggattgatctgagcgcctttcttatcctccttttggtgggagaggaggggcttcttttcaaagtcacattatctgacaacaaagcctaaaccaggagggtggtgttttggggcttgcacacttgctggggagagaggtgggctcaaaggcttcttcaaggaggaggcgcaagggccctaacagatgggcctgaaggctgggaaggactgggggaggtaggcccaggctcgctggctttcccaaaacctctgacctcagtcttctcccaggtggctcctgctctgacagcgacctcactgaaatccctgcagtgaagggtgtccacccatgtgtgtctgggtactgggaggagcgtgtgggtcgtgcgtctcagaaagaccattcatgcgttgctggggagagtgcaaaatgctgcagccactctggaaaacagtttagcaagtttcaagtttcccaaaaagtgaaatgtacacttcccatatgacacagcaatcccaatcctggatatttacctaagaaaaattaaaaggtgtgtttacacaaaaacctgtactcaaatgtatagcagctctattcatagccaatgagatatgaaacaacccaaagatctctcaactggggatggataaacaaacatccctgtatggactatcactcagcaataaaaaaggatccaacctggaagacacactacaacgtgaatgaatcacaaatacacaatgctaagtgaaagaagtcacactcgaaaggctgcatactgtttggtgccatccatggaacattccagaaaaggcaaaactatacgcacaggaggagggaatgaggaccaaagggcaacatgatcggactgggggagtgatggagatgttccgtgtcttgatcatgggggtgattacatgactgcatgtgtttgtcaaaattcataaagccatataccaaaaagagtgaattttatcatatgcaaatatggaaaataaaacagcaacaggtatgccatgaaaggtatgaagagggattttaaagttcctggccctcctagctgctttcactataattccacactcccttttccagtagatggtaactgagagggcagaatggattgttctagattcccatcacatgctgctgcagttggtgaacaggtgaccatattccctagttggttcccaggcagtcccaattcctttttccttagctcatcctcctttttctcaagaagaatatatggccttggcattctttcttgggcttattcatttaatataaatttccctttggttccctcttctaattcttcactgagaaaaatgaaaggcaaagtgtacatattataacatgactgaagggccattcaggacctccacttcctgctaagggacatcccaggctctgcacccaagcaaatggggttgagagcactgcttttctaagcatcaccatcacctaggaacttgtgaaaaatgcaaaatctcaggcctgtcctagagctgtagaataggaatctgcatttttaacaaaatgtccaggagactcatatgcacattaaagtccaagaagtcctgttttagatttaagtgttcatcttagcgacctgataatttatattcccgctagatgttgtggaaagaacagggcctttggtctcagttgaccctgactcttactccactgattactagctgtgtgtcctccatctagaccatactaagtgaaaaagtgatgctagttatagaagtgcatcacctttctgaccctcagtttttctcatctataaaatggagatattaatatcaactttatagtgttgctgtgggggttaaattataaaatgtaataaaacaacactgtacctggcccataacctaggtttatatatctgttgcctcatcccagccaattaacttacccagtcaattcaatattcatcccatcaatttacccagccaattcaatacttattgccagaacattgaagtcaaatccagtatcagttgagacatttgaaggaattaaatggactggggtaaatggttagaggaagagtaagatgaccttgataactgtactattctggaggtataccaggtcagtgactctcaaagtttgttccttggaataccatcacctggcaacttgtcagaaatgtaaactctagagtcccacctcagacttactaaatggaaactccatgatagagcctagcaatttacagttgaacaaggcctccaggtgattctgatacatgctagtgggacactgtcaacaacaccaaaaacctacgttatcagcctttgttagagacctggtataaacaagcaatatttagagaaatattggaaagctaagctgttcctccatcttctacaagtaaggttaaagaaagtatggttaaagtaaaaagtcaggtattttttttaactcagtattaaaacacattggtgtgtgaaaacatgtctggtttggttgtaatgggcattgccagcaatttgccgctaattcatccaacaaattcattcagcagttagtaataatgctcctgttatgtgtcaggcattggtccaggctctactaacagaataaaaccttcttaagtgatgcaaccatcactagtaattggttggttaatcaaaaatgttggttaaagatggaatcataaaacatgagacacaaacgttttactttaatatcaaatgtataaatgaatatgtatttgcctatcttttgatataagacaaaaactttttaagttgttagtattgcagcttatcacatctataacaagctaatttattattgttagtcaaataggaaagctaaaagacatttggaaaacaatttaaacgcagaattcttctagattattcagaatagttaaatattattttaaaattgtcttggtgacattcattgaataaaaattcatttttagctactcacatttattttcatcaagttacatttaacttgggttgcatagaagcactatcttttttaagaactcatattcatcagtttatgtaatattgagttgaatgatataataagtacaattggcatatacagattcgggaaccctcccaattgactactgggaagtataacagctgattccctctttgaaacagactgcataggaacatgagaactcagtctatttactgcaagcgttctccacactgtggggaacagtcagtatttattaaagaaggaatgctgaacattggttaatccaatgattaggttaagtagaagttggttataagagtctttatcaggattgtttcaggggagcctactaataacttattttttaagataagttggagcagactcaagattattcctgcaataaggccactttaactcacatttcagcttgctttctcaagtggaggttattgagttaaggttggccagtctctgctacgtttggctcacagaagtttactagtagtgattatcattcattgaatacttgcaagctgacatttgtggttctgttttctttaaaattttcacccatgaaggctgtagtagttatctaatgccacaatagtgcttcataacaaaccagctccaaacttgaattaaaggagtcagttgttatttctcacaagtctatgagttgactggaaagttctgctgatctgggccggtaagctgatcttagctgggcttgctcatgtgtctgcagtcagctggtaggtcagatggaggctgactggtcaaagatgatctcatctgggactacttacttctcttccccataacctttcatcctctggctcgttagtccagcttgctccatggcaatgatagagtcttcaatccacccccacttcacctccagactgcttcctctgagctgtgctttgttgccatgccctcagttcagggtgcaccgttctaagaagcagttgcatttcctctgcattccataatgtaagacgcaaggtcacccaaaatatttataattatatgctcacacatatgtgtatatctttcataacaaaatgccagaaaaagctttgcttcatctgaaggactagcttgttgattctgcatggagactgttaatcttgtagctgactgtgtttccttggttactttggctgtcaaggagctcagcatccaattctcaactgaagtagccatccttgacctgcctgtcactgatcttgatcttctatcttcagctccattttccttggtcctgatatttattcatttatatttttctattggcttatatattttacctgaaatttgctgaaaattattaaaaaactatctggtctatatatacttaaataaataactgtaatttccattacgacgctgagctcataatgggacaatcaaagatggatttgattagccaatacttttacccaatgatagagtattgcaatcatttagtggaaagatcatttgataacttctactaactctggaatatttctgttgttgtgggttagattaaggcctcttagaccttaatgtgcacacaaatcacctgaggatcttgtgaaattgtagatactgagtcaaaaggtgtgggacaggggtccgatatcctgaatttctatcaagctcccaggtgatgccaatgctgctggtcctcagagtgcattcataatagcaaaggtataataataagaccgaggctatgatgaccagtgctgtgacatttagaattgactcacttgttgcaggcaatatgtgtgcgatagatcctagaagagtgagttcaaaaagcagataaatctgtgcaaaatggtcacttctgtactccaggttgtgatcatcctcaatcagtggtatcaacttcacattttgtttaaaagctggctcctagatgctttttatgtttatagacctgagtttccaccctatccatttattttgctgtggcctcataaagagtagattcctaggaaatcactcagttcaacctcccatccaggacagggaacctccctctctcctgccactgacaatggtccacagcagcctgtcagcctgtttgatatccatagatggcagggacttactatctccaagggagcctcttccattaaggaatggctcttatgaaaacaaagtttgttgctgagtcaaaatcaatttccttgtaacctcacccattaagcctattctgtcatctgcagcatttcaagtccgctctcaagtcagccttccccacactgcagagagctgctatgcttcctttctcctcttctctggttacaccctctcaatccttcatttgctctgcttaaaggtctatatttttagacattttatcactcttttctgggagtggcacagttggtcaatattctcttaaaaaacggtgcctaggccgggcgcagtggctcatgcctgtaatcccagcactttggaaggccgaggcaggcgaatcacaaggccaggagttcgagaccagcctggccaatatggtgaaaccctgtttctactgaaaatacaaaaattagccggacgtggtgacatgtgcctgtaatcccagccacttgggaggctgaggcaggagaattgctgaacccagagaggcagaggttgcagtgagctgaaatcgtgccactgcactccagcctgggtgacagaatgagactccatctcaaaaaaaaaaaaaaaaatggtgcctagtagataccccccaaaattgaaagcagggtcttgaatagatacttatacacccatacccatggtcagaacagcattattcacaatagccaaaaggtagaagcaactctggtgtccatcaatggttgaatgaataagcaaaatgtggtctaaaaatacactggaatgttattcagcctcgacaaggaattctgacatatgctacaacatggatgaaccttgatgacattgtgctaagtgaaataagccaggcataaatggacaaataccatatgattccacttaagaggtacctagggtagtcaaattcatagagaaagaaagtagaatggcgattgccagggcctgggggtgggtgaggaaggtaaatgggtgttgttatttaataggtatagagtttcagttttgcaagatgaaaacgttctgtaaattgttgcacaacaatgtgaatttactgaatacaacagaattaaaaattggttcacatggtgatttttatgtatattttaccacaattccaaaaaatctccagcccagagctggatagacccctctagatgtgttaaggccaatgcggaatatgctggggctatgatttttccttgactgccaacgcctacattcctcagactgtgagccctgcccttcctagtatctgcattacactacctgtgtggtctgttgaaacccacccccgcgaccccaacttctcttcacatgaatttctgccaaactatcctgaaatagaataattgacttctctagtttttatctggcttttaagaaatattatcacttcagtggaggaaataaccatcttttggaaattaaactttcttctttatagtctttctaagttttctatgtcttagccttatttccaaaagcaaaaagaacttctgatattgctctgaaatgatttctgaatgatgcttatgaaaatctatgtatcagtaaacctatgttatgactaatatctaaggatctagaagtgtatagttgttacttgtaccaatatttctgtgctgaagctagtatttctttatttagtcatccttaagtgctgttagcataaagcaataataaaaacaactatttatcttcccaatgggaaatcaaacctaagcattgcaatgatccacttttgatgttcttaataacttctaatttagaggaagccatcagtacagaaaccactggcttgagaacaaaagtgtcaaacacagacacagtcttgtaatttatttgggaccattaacctgaacatgaaatatgtaattcaaagctctgttattttcatgccattggcaggtgcaatcacctttctttgactctcacatttatgtatgtgaaaatttgaaattttctcagataactaaatacatttagctctccttcctcaagttccagcaactactttaccttatttatttatttatttgagatctggaggcatctgtttggaaaagctgagtgcaagtgagatgaaaggtactcacagagaaaactgtattgtggtagtttccaaatactacctgcttctggaagtgtaatttccagaacctttcaggagatgaaaaggcttgtaagagatcagtcatacttcacaattatagaaaattgttagttgcatttaaatcagtcgactgtacaaatggaccaatttggttaaaaaaaaattccatcccagaatatctataggttaagtcattcaagtgccattcacaagaacagacgactcactgtatcagtgccaaaaaaaaggaggatatgtgaatcatttacagttgttttgagaatgccaatttaacagcaacttacacgcagaattttttttttccctgaaaagactgaactctaagaaaaaagtacattttgtacgtaggacttctcccacactctagcttcacaaagaacatttgattttaactaaggagtaaaatgtaaatattagtctcgtagttctgagattttgcatgtaagttttttggcgactttctgtgattggtttggtaaagggtatgtggacacataattctattcatcctgatggttttccacataatgactatgaaacaggattggggcagggaggacaaaatcataactacctgggctcaagataaaaccaagacaatgtttaacatgcgctcatacaaaatcactgttgataatacaaaaaaattcacagttctggtttcaaaaaattaatccagatctcttgtgtacatatgatgaatctttgggaaaaaaatagctggatctactcaacttatgcttgaatgagcaaacttgtggcctggttgtggttgctacaactataccctgattttcagtgtctgttatctataggttggtggtgggtttttttccatgtagaatatcttgtgatgtgggagaatgatgttgtgcttccttagggagctggctggacaggttcatgggaggcagtaacctggcgggacatgtgagcttcactgggctctgctggaaaggggcagaaagataacatatccgtggaacaggatttgtgaacttgtgttaacatctctgcaagttcaaacaaggaataaggaagatcttaatggatattttacatgtgccttctctacaatttgaacctaactggaatgaagaatgggaagaaagaactactttcctttcgttcactctttttttttttttttttttttttttttgagatggagtttcgctcttgttgcccaggctggagtgcaatggtgccatctcatctcggctcaccgcaacctctgcctcccaggttcaagcaattctcctgcctcagcctcctgagtagctgggattacaggcatgcaccaccacgcctggctaattttgtatttttagtagagacggggtttctccatgttgaggctgttctcgaactcctgacctcaggtaatccgcccgccttggcctcccaaagtgctgggattagaggcgtcagccaccgctcccagcctcattcactcttaaaatctacagtatcaccattcctttgaaacacactctccactcagtagtgctgaagaccagtattgtggtgttgcccaccatattcttggcacccacaaaatacctggcaaatcaataactatcttccccaagatttaagaaggaaaattttcaaacatagaaaaatgtcgaagaattttgcagtgaacaccactgtaacacctaaattctaccattaagactttactggctgggcgctgtggcttatgcctgtaatcccagcactttgggtggccaaggcaggaggatcatctgaggtcaggagttttaaagcagccatggtcaacatggtgaaaccccatctctactaaaaaatacaaaaattagccgtgtatgatggcatgcatctaatcccagctgctcgggaggctgaaacaggagaatcacctgaacctgggaggcggagattgcagtgagccaagactgtgccactgcgctccagcctggacaacaggctctgtctcaaaaaaacaaaaaaagactttactattttgcttcagcgtgtaaccacccacccagccatcctctctgatccctctaattttgtatgcatttcagtgtcagttgcagatatcattccacttccccgctaaatgcttcagcactcatataactggaggtgaatatctgttcacaattcttttttcctcttttgaacacctaatgaaatacaatcttaaatgtactatttaataaattttgacaaatgcatacacctgtgtagcccaaacacctatcaaaaatatgaaacattaccccacaatgccaccagaagagcctcaagcccatcccagtgaagctctgctcccacccacccaccctcaaaatcactcttgtgatcttttttcaccagtttttcctgttctggaactccgtataaataaattcatacaggatgtagtcttttgtgtctggcttatttcacttaacataatattttttagatcatcgatgttactgcttataatagcagttctcaataaatattgattagcttattttaaccacagtgttgattaaccaaggattacagttgattagatgtacttaaatacagctaatatagcttgaatgtctcttataaagcttttgcaggttcagaactgctatatgttgttgactagataaaagtggggcaagttttctgggaaaagaaaaaatgaggcatccatcatctttttagaattaaaggaaaagatatccaaggatgatgtttgagcacacgagacaggtcagatagtaactgactacaagcctctccccttctctcaggtgtaggtatgacagctaaagatggcattttccacaggaaggttgttctggaatattcatttacacttggaggctataccccaaagcaggacaagccctgccaagggggaatctctgtatttcagttctctcggcagcagttcctcattctctaaggagggggcctgacaaccggcttcaaggaagcagaggatagagcttccactcagtgtctgttgtggtaaacgtgactggctttttgggggagtcccaattatttggaagagccccaactgaaaattttcaaaagaattccctctagcccacaactgccttctctaaaagtgggttcccaggctcaggaagggtgtgggactctgtgctatgtgacataaaaattttgtgtttatcagtgatttgacattcttgttaggtgtaatcaggtagttttcacctctcagagtttatattttctttcctatcagtcaaatgggctaaattcactggtggactggaggtgacaccagcttgcatgtggcccagattgcaactggtggcacctgcaatctcaggtagcccttctaggtgaagccaggtggagatctaaacactttaactaaaggtctggctccgcagcctctttcctgagagctgtggggggcacaaggcacagaattaaaacagggtccgacatagggaactccaaggagtgtgctctttaagatcacaccagcctttttcagcaccattttgccttttttttttttttttttttttttgagatggagtctcgctctgtcgccaggctggagtgcagtggcatgatctcagctcactgcaacctccgcctcccaggttgaagctattctcctctctcagcctcccgagtagctgggactacaggtatgtgccaccacgcccagctaatttttgtatttgtagtagagaccgggtttcaccatgttgaccaggatggtctcaatctcttgacctcgtgatccacccgcctcggcctcccagagtgctgggattgcaggcgtgacccacagctcgcggcccattttacttttaaaccgttatttagcacccaaactcagggatacttgggagtagaaattagaacgggacagataagtggggagactggtgttgatggaaacctcagtgagaaaagtgtagatgggattacagttgacaactggttgccttgatttaggataattggggaaagggaggctggggcacattgaaacacccaggttgtcgctgcctaccccagctgctaacatgaccagctgtaaacttgctctgttcttagaaacctcccttccaaaacatggattctcccgccagtgctcaagatgggacacattaccactaagtaagcacttttcttaggagcatttcttaggctgttaaaatgccaagactcctaaccatccttggtagctttgaacctatgtaaagaggtcagttagctgccctagtttattcctcagaatgatgagatttggcactgaaaatattgttcatactgagcctcccatcaaatgcaataagtagataaccacaaatacccacccttttatgctcataactcagcatgttggaaactattttcccttgacctattgccagcccatcacgccccacacccaggagaactcaagccccaaaccggccgctgaatagtcacgcttttctgcaggacatacctactattagggccaaaactttgtccacccttcaaaggaagtcgatgtttccatataaaggtcccctcaaatgcaacagcaagcccgtgggagaggggttagcagaggctacggccagcccacgggctttcttcgaccttgattatgaccaggagtgtagctgttaattgcgaggcttgcctcaaggtggaaaacagtatcggtttccactgccaccccagagaaggcaagttccgcggctggcggtgctggggacacggtccctcccaggcccatctcttgccacccagagagctgctcggaggccgcctacaggtgcaatcccggcactgcggccggggcgtcgggccggggagggcgtccaagcccaccagcatctccgccggcccttcccaaagcctgaacagggccccggcgtgcccgccgccttctacccccggtttccccgcgcctctgccccggcgcggtttggataggaagctgggagccctcccaggctccgcagactcggatttgggagggggtgggacgcggccgaggcttcccctcgaatctgcggcaagcctggctccaggaaagtttttcaaagttcccagcagcgtctgcccaggtcgcctccgcggggcgagcagacggcggcaagcgcgccagcctcgccgccgcctctgccgccagcagagcgctctgggcggctcgctcgcgggaagcgggccgaactcccggcgggcaggcaggccctcctcccggggcgaaagccgcagctgacgcaggcggttcggaaggcggaagctgccccgctccgaccgctcagtcagcgccgcggcgcctacacctggggccccgacgcgcgggcaaaggcgcacggcccggggcgcccgagggggcggtccccgctgggggcctccaggcgtccctgagcaacgatcccttccaagtacctccccgcactctcccttccctcctggcccgaagctcccgagggcgggggttggtgtggggccctggttcttctacgccgccctgagcatcccgctgcccccaaccccttccaagttcctcctcgcactaccccctccccagcaacgtgaaggggaggggcgtgcccagggtgagcacgccctctcatgaatattaataagcgcgcatgcgccctgcccggcgtgctgggtagaggtggccagccccggccgctgctgccagacgggctctccgggtccttctccgagagccgggcgggcacgcgtcattgtgttacctgcggccggcccgcgagctaggctggtttttttttttctcccctccctcccccctttttccatgcagctgatctaaaagggaataaaaggctgcgcataatcataataataaaagaaggggagcgcgagagaaggaaagaaagccgggaggtggaagaggagggggagcgtctcaaagaagcgatcagaataataaaaggaggccgggctctttgccttctggaacgggccgctcttgaaagggcttttgaaaagtggtgttgttttccagtcgtgcatgctccaatcggcggagtatattagagccgggacgcggcggccgcaggggcagcggcgacggcagcaccggcggcagcaccagcgcgaacagcagcggcggcgtcccgagtgcccgcggcgcgcggcgcagcgatgcgttccccacggacgcgcggccggtccgggcgccccctaagcctcctgctcgccctgctctgtgccctgcgagccaaggtaggagcccttctccgggcctccctcccagccgtcctctccctcccctcgcggcgccctgggcggttgagccccgcgagcaggctcggcagccctcgagcgcccgactcctcgcccctgcgcccgagcggctgcacctgggctgagcgcgccaactcccccacgggagcccctgcctcctgagggtgacccctccaggccggacaggggcgcgttcgctccgctgttgccccccgggaagtcgtcggatttcttccgcactcgtgcatttttttttttttttgccccggaatcatgttgagtccttgaacgtagtttcgcaaaattattttcactcggcgaggagggctcgtcggggcggggagtgggagggagtcgccacctctatactcgaagaaaacagctttctcccgcgctgacctacctccttccctcgccggcaggtgtgtggggcctcgggtcagttcgagttggagatcctgtccatgcagaacgtgaacggggagctgcagaacgggaactgctgcggcggcgcccggaacccgggagaccgcaagtgcacccgcgacgagtgtgacacatacttcaaagtgtgcctcaaggagtatcagtcccgcgtcacggccggggggccctgcagcttcggctcagggtccacgcctgtcatcgggggcaacaccttcaacctcaaggccagccgcggcaacgaccgcaaccgcatcgtgctgcctttcagtttcgcctggccggtgagtgactactcgggaaggaggccgggcggagcctcacacccgcgcctggccgagccctgttatcccttgcgagagggatttaaagggctttggcttgaaactaggcgctaactggggaaatctctaggggtggcgggtgagggagccgggacactatagttagatctcggctggggtagtcgaggtgggtcccattcctgctgctatttgcttagtgcacaaaagtggggatcccagagggtttatgggaccaggctcctaggaaggccggtgtaaacttgcaacttgaagttcccagagtaactctcccggccccaagccaagagatcgttgtagctgatctctttgcttaactaattaaacctggtgcgccgtggaaggcgactcggcgcagttctggcctgcgaacgccgtccaaattggcaacctcccctttcccgtgaacggccgggagggcgggtgtgtccttcctggagggtgtgggggagtccgtttcccgctgctccccgggagattttagtgtgtgcgggggcgctctccaggttcggcttaagggccgggggcggccgccgcaggaggaggttcttggggccctcacaggagctgtagacctgggaacccccgcccgctgctggccccttcctgcccccgcccccgagtggtgtagctcttgtggcctcacttccagcggttcccgggctctggaacagctgtgtttgcagacttccccgggaagggcgggtgcacggcccccgcaagccttcgggggccgtgccaaggcttggaaggggtggtcttctggaggtagtgcctgagggtgtaagtgataggccctcatccccccgccccattccgcccccaaaggagctcgaggcccgggcccagctggcagatcctgcagcgaggcccttgcaacatcccaaaatgggtggaaggaagatgggtgcgattgcagaaggggaggaaagggaaatgttgggggtgtgccctctgcctggctcctgctgtccaggaggcatgactcattgccaagactggggcttggcctagcctgtgctgggagggtgggtggtgagagggggagctcggtgccccagagcattgctttccaccacgtgctctaatggggtgcactctgctgcctcctgtccgccggcttaggttgtgattctgggaggagacagaggggagactatctggctgtgtctgtgtatgaagcttggggtggctcttaaaatccacgattacaggagctggcattataaagtgccctctgctgtgggtgagataagacagttatcaaaaactgccatgaaaaggggtttataaaaagaaaaattaaaaccaacgctgtctgtgaagctctcttgaggtccaagggctgtttctgttgtgggatttcatttttaccaagagtatttatcttgtttgttaatcccctattagggagaactttaagctaaagagtctggctgcgtttaaatctggctggcccaagctgactgtgaatactcaaactgcccttgaacgtgtgtttggagtttagggggaaggggcctgcaggtggttccaccctcctgccggaggatctgtctggagcccctcgcttttcacaagaccataaaaggaatcttattagtgatgtggaaaagcagcagcctggctgaggctcattttggagagtagggtcagagggatggctaacatgaaaacaaggaggcttgctccctcgctggccaaggaaaagtgacctagaaaagtgcgtctgtccgcttttgacacttggtcagagtcctcaatggaaaacgagcggaaatagtgtgggagggtaggagaggcgattgatttgcatttgctggtgctcttctgtggtttcaggccccacgggtcaccaaccatgaaatagactctcggcttttctcgaatgggggaagaccgatggggcaccactgaaaatgtggttcttttgaagttgggacaaacgcatgtatcactcataaacaagtctccaccctgatgccccagaaaggcctgctgtgaaacataagatttaattctcaagagaaattggagtttaggtgtatttgtttttctgtatgtggttggagaaacggcacagtccgtaactttcaagaatgattccaggctgagtagaaacgtaactgaaacacttaagtagctgagcgagtatttaactagagggcacagcttcatttagtttggcaattaactatgtcttttaaaactgatttccttgaatgggaaataaatgaacttagtacagaattcaagagatagcaagaaaaggatatatggttaaaaacaaaacaaaactccaaaccaccttgggctcccaacccctagcaggcacaattaccatttgcatgagtcctcccaaatttgctgacgctgggtatcagcaaagggtgcaggggtaggtcagtgtagaaggtcatgtagttcatgctttttgtttggaattatgacccctatccaagcaactgttcatgttctagagaggacgaggaggaaacgatttggtcagatatgaaatacagtccatgttctggtgtgcatgtgaaaggctttgtagaggtggcccttcctgtcatatatcatatctgagtatgtcccacgtggtgtcccctgccccggctctggtcttggggtagtttttcaccactggcttctaattctcatactgttgctgctctaaggggcttaacttgcagcaactatctggattaatgattctcaaattgggggaccaagtgataagaaccattattgtgggaagtaattgggcttaacaggaaataatttaggaattaccacttataaatcactgaaacggttaatctgtacctcccaaaattagtgctaaatcccagtagtgcctgcttattaaaaatacattagtgtaattaccactactcatctccaaaagctttttgggaacttcagaaccccagttagctgtattgctgcatcggtggccccagagtgaaatgaatctagagaaacgttaggggaagaaattggggtatctggcttattagcctcatatttaaattccattgatcctattaaaagacttgctgagatcaactttttttttttttttttttttttttttttttttttttttttggaaaatccaatgaaacgtgattcttctgtgtgagggatgccagctttggcccccttcatgcttcaggcctgaatgaccaattgccacgatgctaatcacagaatgtaattgacaggcccttacttttatgccttttgctgtcttttccagtccctgagcttctgtagatatggtgtgggcacatggagggcttaaggatggggttctgatttgacctgcctcctttctgcagccaggatttgcatcctgcccgtgtagtcagcatgtatacaaagaaagagcatgtgtgtacgtatgtgctcagagcaagggactttctgcatgtggagaaaacgccttttgccctaagaagtctacctcaaaccaaagggatgaagtgatgtatctgtgttgcaacactgggcttgggggaaagtgaagctgtgcttgctttgaaagagctgtgctaagtatctgcagaatagctgctccaaaaatggaatctttattccaggtacttggtttctaatttttttttctcttgcaggtgtaaccttctgtgttttctttctccttgttgtcttgtttcttagcaacttattcaaacctccagtacttataggaatttgcaacccaccagttccacacccgtaattctacagggacttaagatgtttttagaaaacggtgaaactttggcgtggaggctcttgggggagttcagtgggttaaaaggagagtcagcagcaacttacaggcatgcaacctcccagaaaatcagcaatctaagtgctgctcaaaatcttcacaccaaatagtggtgcctttggggaccttttagatagaagacgtggaaagtttagcatggagaaaaaagttacttaaaaaaaaaaaaacagtgtcaaggtaacaaggagccttcacagttcctgatctgaaaacaggaatgtgaaccagaggccttggctggattcatatcacccactggccccattgtagaagggccagaagttggtcccaatgtccggctttcaaggttagtgacaatgtaagaatgcatgatctctggatgtgcatacaattagcgttgtaatccataaatgcaaatactcctgcaaattcttccatggtaaacttctgtaaggcatgttgctcttccacctacccccatccttcaagcctaggatctaggctgctgagagaagtgactcttggcttcagcttttaaatatatatatatctctcaaaacttaatcttttcttccaactgttggaagatacattgggatgaatggaaagtggtgattctaaaatggtggtggaaatggaggagggtcctgggttcagaaaaatcccacctttactttggtgcatggcactgggtggctgtgttgtgacttctttgctgatttctgattaccgcatggaccacagcagccctgtgactgctgttttttttttttttttttttttttatggtgccagtgacatctaccattggtgcagtgcgtgtgctgggaagaaattccgcaaggtggctcccagtagttaaaggagtacataaatagtcaaacatgcagagtcctctaccagctcaacccagtttttatgcacttttggtaaataaacagaaaggcttcttgttcaggcttgctctgtgtgaaccagaccgttgtgcttggctggcttcttggtattctatctattaacctcgccacccttttgtaactggtgcatttaattatcagtgggatgcttttcaaacaggtaagggtaatgatgggaaagggggtggggatgtctcattgagagtcacaaatctggatatgagctttggggccccttggtgagcctttgagtgggctttgatgagaaaatcaccctttgtaaccagatcggactctattgacatgtcaagccctacagacttgattgctttctgtgcctgaagtcttagcctagatgctataggatagttgtcctttcttatctcactttcccaaaacccactcgcattgtgtgcatgagtacgtgtgcatgcgccacacatggactccctgcaaccttttctgcttaatatgttttgtgactggaatattttatactctggccacccagacacaggcaggacaatagagttggccgaattgactgaaatgaggattatggagaataatagggcctctccaaaaataatgctaacacaggacaagcgacaggaagcaacagttgagtcagcagagctcagggcccctgacgaaccctgggagccgactgactgtgcacaatggccgcgttggcacgtcgggcattcccaggatgtgcgtgccgccggcgggcctgcctgtcgcagcagcctggggttttggacgccgcacgcgtgccgtttggatggcggtttatttgtgtccgtcagcttggcaggaggggaggcagccgcttctcagggcttggtttggctgtcactgttgccaggaaaaggaagctcccggctgccaacacaattacctttgtttcttacatccccccttcttaatgtggcaattaagtgcttaccgctctgcccagtgccaaggtaaccgccatggagtgggacagggcagagaacacaaccttggcacagcagcctaagtgtggagggcgggaggaggtgcaggggccccagccttgctgggaacctggtggcccttggatgccttggggctttgatgccaggactctcctctaggtagaattccacagaaatcttccaaaaagcaattccgaaggctgaccattcctctttgatgccacaccagaatgggaaccagctgccaggtttccagatttccttgggcttggagctgggaaggggctgaagtgactcactttgcaaatccagactaaagatctgtttgctacccctccttcctgtgtggccttcacagtactgttctggaaaacataaggaaagatgaaagccaggtgactcttcggcagagtcttagttctgtagtctgaaatcaagaaaaacccaggtatttgcttttgttgttgttgttttgctgtataaacttaagtttgaacacttgcctttccaagccctcctgggatggaggactccgcctctactgggggtcagagttgcagtggctgcttgtatgtgacttcggcatagtggatttgctgctctgtggcctggtccctgctttgatgtggggtgcatgatctgggatctcagtgcctgggtgtatgttcagggatgtacagaggtcaagtgtgggcctgggaaaaattaaagttctctagcaactaataatcattgttaaattatcttgattgctgatctatagtgtggggatggagtgggaggttgagtgcctcctaataggaaccttggagggaatcctttttctctgtagggctgggcaggaggaatcctcctgccccaggagaccctaatcccctccctgaaacagacaggaaaaaaagtccaggctttgttgccgtcactgtagctccctgccctcaccctgtctctgcctctgagaaagaagggcagttcatggaaaatcacagagccaggcacgtagggctgtgtgcaattcttttctctccaggtggggtgatgtcggtcagcaacttctgaggttttcccagttctggcgaggatgagcctggtagactgcttggtcgtccaagttcttgtgcaagacctaaggatgctttcctctttgagtattaaactgagttagtactgccatgccagctcagtcccggcaccttcccttgcagtggggtttgtgggtattatgtgtttagcgcttgtgcaagtctgtcaaaactcctggtatcaatgcatttaatcagaggattaattacaacaatactgttgaagtggaggacgtgggcctcaacgtgaccagcaaatgaagggcttaattatacagaatcagccacacatctggcctcattttgactgtgctcttacctcaaatcagtagagaaatataatttcttgctgctcttagggaagagtcctgtaatttgcaggaagtcctaagaaacttaaagaggcagtaaataaggtataactttcgctaataaaatagtaacaacagcaatgaatttggacctgtggccactaacaggagagggctgggtatgtgccctggcttgcccggttttgcttgcttttctgagcattttcccacagttatcagtgaacgaaatggaatcctactctgctttgagtatgaaacatatttcggctgaattccaaggcagggtctatcacaagatatttttatattcagagatgacctgctgtgtcactctgagagcgctaagctggccttgagttatgaatgaaactcccttttaccctccctttttctctttttcctttatcttataggtgctttctcttctcttggcagcagtgtgcttctggtggcacagcacggtattatttaatctatacacgcttctatttcctatggcttggtttctgacacagcaaagcagggattcataacctagttcatgttccttgtctaccccacctgccttgagtacatttcttcagtgccaagatagcagaagcttcatttaaacgctggtgttttgtgagactgaccttactgtaaattacgaaggaaaattttagaaaaggagggaatttgctaatagcttaggtttggctgggggtggggaggtggaattctgagataagcttggaagataaaaggtgccttcagtttaacagctggcatcttgccagtatccagggaatttgtttagttagtagactctgattattcttggaatgttagatcttattaacagataagttcatcaataaatataacccatgggtgtgcggttgtttctccctttgtactttcttccctgggatctgcccccaactccaccgcccaagtgaggttgacttctttgtcttgcagagtcactttgcatctaccccctcctgtttcctagagttacccgatacttgtgggagccaggatggtctcacatagacagagttttcaaaggggttctaaaaaggaaaagggggcctccctagagactgcctcaccagggcccaaagtgtaaccttagcaataccccctcggtacaaatacctggttaggttagcttagaataaattctttgtgtgtgtgtgtgtgtgtgtgtgtgtgtgtgtgtgtgtttcctcatgcactagggtcagggtctggaaagttttgggaaactatatgctaaatactctcatatcatatagtgaggtggcatttcctgatctcaactttgagctgcctgcatgcatgttgactccagtgcgtccctgccaggtgaaaggagtcatttgtcaacctgggaagagtgctgacaaaggaaggggagttggtttggatttaaacatccaggaactcaatgcaacaaccaacagaatttttattttggcattatggttttgtttggtggggtattctgggaggccaagaatgtacgagattttggaaagtcgaccctgtttctgaattgctaaattgtttgtttgtcttgcagaggtcctatacgttgcttgtggaggcgtgggattccagtaatgacaccgttcgtaagtatcgcttctgtggacttttctctaaacacacgtggaagtgtggggcttggccaaccagttggagctggatctgtctccttagtacttagcatttctgccacctcttgccttctgttctcccctgtaccccagggtgaaccttcagtggaatgtattccttaacttttctaggatttttgcttggaatattaagtggccagaacagaatcccagttaactcattccctgattatgaaacctagattatcttcgggatagagatcttaatggttttacaactttaaaaccttgtagtctgctaaaggatcaaagtagtgactttttaaaagtccatttaaactttaagtgagtgtttaatctctcatcagaaagataaagccataaaggtggtgctgggctctagagaccgaccttgaatttcacttggtgggcaggtgagcttctagtctctccgggtttcccacactgctccacaaacctttcattgaagcgcaattccagagcttcacagccattacctgccttgtccctttctgaaagatggctctgttttcagtgcaggttgcctttcaggactgaggggttggttttggtggataagccatggaggatgtgattgaaatgacatagtctggcttacaaagtagtcttgctctttaattgtaactttacagtgttttcgctcacgagccgaaacttcaagttccctttttgccagcagagtttgggttgcggtcgctggaaaacttgatgctcactgaaatctcttggtctgtgcatgaggaagagtggatccagcttcttgtcttggctctctgttctctgaatgccttgtactttttgcttttctatcttaccatttttttttgtttgctttcactgtgaataatatattttcatctttccttgccttgcttttttttgctgacagaaaatggtgaatgcacaccgtgggtgcagtgagggcttggtgcctgctacgtgggcagcttccacctgtggctggcttattgggctacttggagccacagaatcattgctgagctccgatgtgccagagagtcccaggccatttgggtcactcttctagcttgggaatcttaagtccagctttttggatgtcatcctccctggagggggagctcatgaaagtccaaggttcgagtcttcctccccagagggctaccctgtaatgccgtgggggggtgtgtgtgggggtggcagggaagctctgtcagccttggctatggctgatgccagtcagggtcatagacacctgtttgttctcccctccctgccacaaacgttgaggactgtgaacattatgtcactgtgacctgcttacaatggtaactaagcgttaggcagaaggggttgaggaggggggagacataggctcttctgtaatagtatggtgtcgacatggtgttctttcccctcccttttagctattgaaacaatccacccggtagagtgaacagcttgaggttgatcctggcctgtgataagagccaggtcagtatacttgttagggacatgtgagagacctccccgccacactgcagcattcacagcacctttcctggacctcctgtcacctcgcaggtcagggagttatgtcccctgggaacccagggcttgtccagagctacccacagttgtctgcatttccaggtagcccgattttggggttctaggatgtttcatctcctgggggggtaatcaaatccctggaagaggacaagaaagactgaggtaggaataaagttcttttaaacctcaagggtgcccattgcaggttatcaaaactcacttggtgaaccctgaagagggagatgggtttggtggaaatggtttctccacttgcctatttggcctcttttatgatgcttccaaggaatcttgaattcagcacagtcaaaaccaaactcaggatcttctcttgccaaaagcagtcccttcccagggccccttctgggtgtctggcaccgatatttgaacactcattgccataagccagaaatatagaaggcgatctgtgtaccccctctctgttagcatccatacctagtccacctccaagttctgaaaaatctctccagctcttcacttgaatctgcctgccttctgccactgccctggtccaagtcaccatctgctcatgactgaacttagagtagccttcgtctggtccacctttatctgctctgactcacctctagtgctttctccattcttctgccatcctggtcttttcagagccataacatttgcttgtcacccttattatgaaaaaccaaccacttggtggccttctgttgctcttgggacagatcttcatgtggcccacaaggctctgtgcagcccagctttgtctccctgccagccttgtcttacacaccgtgttgtccatcgtatctgtagcctggccataccctagcagttgccttcctatcctcaactacatcacatgctttctggcctcaggacctttgcacatgctgtttatgctacttggagtgttttgttcctttcttcaccctcagccactccctctggactgcactccacagggcagaagctgaggatgttcagaagcccaaacggagttggctgccctgtgggacccaagcgagttgtaaacattctggcttcagatgtaaatcaaaggcagagccctgagttttagggcagagaattccttctatcagctctgcagtgagccctcacaggcagactcgggcccaaatatagcctaggtgctgtttatgtatttgaaagtatttaaggctggtccttctgtcatcggtcctccaaagtcttttattacattttgggactgtggtatatagagttccaaatttctttctcccctagagcaaatggtttcagtttactgtaatgcataataaacatgtaaacataaataggcacacttcagaccaggttttccctgtagcttagctttctcggctaaggcccccttccaggtttttgggtcggtgtggtcccaggttatgctcagactcgcccttcatcacctcctccttggcctgcgaggcggtcatggcttcttcgtgactcatcttcgtggcactggggattgcagggaggcatggtgatgtccttttccagtcacaaggctggactgccaaacgaactgccacagattcctttccagtgccccaagctgaaggaaagcgtgatcaggaagcaggcagcagacgtatttgaacccagacatgctcgaccccctccctgagcaggtgtgaaattatgtatgcagctccatagctccactgaggattctgaagtgatcctctgcacgacacttcccggaaataagtggaaagcttactgcatgactgaaaagtacatatcagtcctgcacccctaggattgccctggactcttgtctaaactgtttgttgttgataccagcctcagaagctggatgcctttaagccatggctagtgtgtttaaccgatcccttttatgaagatcttgtaagcgcgtggtaatagcccactatgctttttaactgaaccagcagagcaaacatagttaatggagagacatttttgtcattccttggcctctgtttatttgcaaaaacgagtaaagtgttacctgcctgcaagtggttcagtgcgtgccggggtgtcaggctgcaggtatgtgagcttgttcaaggcttgtcttgcccacgcagcagtttgagagccctagagggcgaacgctggggccctgttggaagcggtgtgtggatgaagccacccaggagtcccttctctcctggtcacttatagggcttgcatcactttttaaaggagcactggcccgaggcctagaaaaacagccatgtgggtgggtaagaatcacaaagacattgcaagtcagtcctaactgtctctccaagatggtcttgaatttgacaaggtgatgaagagttggtgctggcaggtttaagaaaacaaacacaaaaccaggttggggtgctgatttagtgccttgctgccttttcagatccctcccctgaactgctggcacctgatgtttgagctatttttgtacctgtctcttctcaaactagatgataagtggcctcagggcagggactacatactcctgagagctgcttgagctcgaggtgtttattatcctcagtaagcattttttttcaggagcatgacttggctcaaaaaaacaaaaagaaaaaagaaaccctcccctcaatttacctgtgtctaaactttggtgaattattctcccatctgccttctgggcagaggagaaaggtggaatgcatcaagttcaaggtcttggtatttaagagctggctttaaaggttgccatgttaacaattgtaaaaaaaaaaaaaaaaaaaaaaaaaaaagtaacttaatcgtctccttggcttccagttaagagttttgaaatggacaaaaagcttttctgagcaagacataaaaccctaaaaccagaaatgattgctgacctttatctggaataatgaaatttcttcaagagcaacattccatagggagctactgtctctcatatgtaaagagcacttgcaagtcagtatggcaatgtaatagaaaagttggcagagaagagaagctgttgctgttcacaggaacaaatataaatggttttgtaactaccagaaagggctcttgccatcacttagttaaatgctaattaaatgagatacctctttacctatcaggcatagattagaaggtttgataatgtacaacgttggcagtgttattgggaaacacagcttcctgggtggtgggaggacagactggtagtttgagactgtggacagaggttgatttgttgtgcacggactctgattcagcacttccatttctagagtatctcattgtgggaaccatacacaggcagatacgttcaaggaatgctcactgtggctttgtttaatagtaagaagcccaaacgactcacatgcacacatgtcagggactaggtaaattatttattggtgtttccagacaatgaaatactgtgtacccattaaagaaggtaaacaagtggtaacaggttgtctctgggtaggggcataaacttttcatttctttgccttttttacaacagatagaattttgtagcaggtgcatatgtttttattttaaaaagccaaaatggtcagggaagaaggctgcaatgtgaatattaacatgattcatcactttgtctctagaacctgacagtattattgaaaaggcttctcactcgggcatgatcaaccccagccggcagtggcagacgctgaagcagaacacgggcgttgcccactttgagtatcagatccgcgtgacctgtgatgactactactatggctttggctgcaataagttctgccgccccagagatgacttctttggacactatgcctgtgaccagaatggcaacaaaacttgcatggaaggctggatgggccccgaatgtaacagaggtatgtgtgtgtgtgtgcatgtgcacgtgtgcctgttgcttttagtgtccatttatcaccccaccagcaggcaggtggcatgcggctatctcaggtggggtgggattttggctgttattctgggcctgcagtatgaagatgcggagtgtagaagatgctgttggtgccccatccagatcccctttactggcatccccatcccccaggtgctgtgttggctgccaacagctcacagctgctccttctcaggagactcgtccttggccaaaccagtgcatgccccattcctccagctcacagtcagtgattgacagacatagggctacaaagcccagcttcctttgccttaaaacagtagtacaatttgcactctagagcttaccctgggattaggctgaaatcagactccagttgagaccatgttcttgctcagctctttcccctaccccatctgcttccctcaattccttctacctatgtccagatccccttctcagactctgcttctaaggaacttgacccaaaatagatccagacaggactaggtcagcccagttgttgtctgaacaggctatcctataggaaatgatagcccctgcattcagggtagccttgcagcaagttttcactaggtgtctttgggggcatggctttgatggggagaggtatgtggttagctcaagctttcctattggtgtaggagtgggcccacttttagtctctgtgctgtctactgtcccagtccctttatagaattcagtgattccaattcatagcaacttgatgggtaattctgttaactgtataatatcccctcatgagcaataatgtactctgcttattttacatgataattaggtaaattgttttgatagactcaatttcaaagtgagtttttcaaccatgagagaggggtgggtcatgggggaaggaatttacagctctcccgggtagtactactgctttcttaaataattggagagaagagtttaaaaaggatggcatttctggaattcaaatgaaaaggggaattcattaacatattttagtgtgttttaaaaattaaacgacctaacacttagtgtgggttttttgtttggtgtttttttttttttttaagataaggtgctcactttgtcacccatgatggcacaatcatggctcactggagccttgaactcctgggttcaagtgatcctcctgcctcagcctcccaagtagctgggactataggcacatgccaccacacccagcttttttattttgtgtagacatagtcttgctatgttgttgaggctggtctcgaactcctggcctcaagctatccttctgcctcaatctcccaaagtgttgggattataggcatgggccactgttgcctggtcttagaaactgacattttttagaagttacttttttcttttttttaaacgaagtagagaattgctctgcaaggatactttataaaagtctcaccagatctggccaccagattagcctgcccaatgagtccagcctggctggctctgttagtcccatggaattttcaaaccaggcatttggtatgggttgtttttttttttttttttttttttaaaggctgaggctcatctgaatgtgtcctggtgggatggggaaggattatctatacctttttttcttctaatgaaaagggtgtgggcagaatggaaactgaccaagctctgctcaaggagccagggtagctgtggtttagagaggctggacgaaggtcccccttccctcgtcaacttgtctgcattttgtccccaaacaatatcatgttttcagaatctgctaacaaggccttgaagtttaaagctggttttgttatttgggcccctcccatcttcctctccttacaagggacttgatatgagacctgttaaaatcgtggaatttgcagactttaatgcaatgggccattctcatgaccggggcgatgcaaggaacaggcagtgtgctgacacgcccttctctgttttttacagctatttgccgacaaggctgcagtcctaagcatgggtcttgcaaactcccaggtgactgcaggtaaatcaactggtcttttgtgagatttcttttaattttcctttatgtaagagaggaactgactttattgtgactatgcctcttttttccttggagaacaagaaagcttttttaaaaaaaaaattcagatagacacatccgaagcttattaaattataccagctgtctggtggaatgcacacaccacttctctcttggaataaaaagaaactctttgggcatagccagtgacttcatgtattaactgttctgtaaattgataacacatttttataatcttcccttatagtgctgatgggctagatggagggatgtgggcttgtttctttgcgtctctctcctcttccaccaaggctttcttctcccagccccctccccgacttttcccatcaataggcgaaagtccagcattctttagaatgggattagtccaatctcctggcccctttgcaggcgggagctgggttggtgctgagaggttaatggctgccctggaatcttgtcagttgagcctgatgaatgtagacttttgctgcagtcctttgaagtctgttcctttatggtccaggaacaatgcggaagccaaagggaggcctgccctgaccacttcacgatggcgggttttggaacttcttgaaatttatattacgcccgtttggaaaaggcttattttgggaaatattgttggtgtctgtggtgtttttggcagtcttaatgctttgctctccctcctcccaaattttaaggagtaacgctaaatggatcctttgagcctgtcacttttgcccccaaagctactctgacatgagtaaagggaatcttatgaaacatagtctaaaccagtatgtcccaaactaatgttatttggggctcttattaaaacgcaggtcctgattctataggtctgggctgagcccaggtttctgcatttctaacaagctcccaagcgatgctgctgatggaaccatcagcaatcactgcccccagacctcagtactcaaagtgtaacttccagaattaacaagggagctgttaaaatgcaggttcgtgggctccgtcccacatccatagaatcctagtccttggtttggcccaggagtctgcatttgacaagctggccacatgactttgctgcttagtaaattttgaggctactcctttaaagagaactatctgtggcctttacctttatgattccaccgctccgtctgttcccctcccatgcaagggggaacatggaactaaattaagaactggttgtcccgaattgtctcttcctacacttcagaaagatagtttatttcctggaaggctgaggggcttctcctgctgtctcccattggtggcgatggactgtagtatttaacagcattgctgtccaatgcggagcaggaatccacctaccttaactcttcctaattaagggtgttctggagaaagtcccaatggcagtgctattagtgattccaagcctgctgcctgctcagatggatatcagcggaggccgactgtgatttgtgctgctgtcatcagaacacacatacagctatacaggggagggccctcccagccagaacaacaggctttgtttccagaatttagccctttctctttcgaagtcccacctccctctccctgcccagacacgcactgatggccttatttacttaaggtgcgactttcccacacatcatttgcatagtctcccagcccagttttccctccctaccttgaaagaaagtcaaaacagaaccttcacgctgaggaagttcaggttgtgtcctgctgcagaaatagttgaatggcaagttacctgcaagttgtcttttggattatgtattacacaggttattttttttttcacccccacatgagaaaatttactggtttttgttgttcccaagtagactgagtccctttccctgggtatacatgcttgcttattgcaagcctgccaataatatcaaacttaattatgaatcatcatctgaggaaagtcacttcaatttctcatgagaatcttaatcatatattattaaactgggataacttggttggtgcctcttttagggtcagtatttttatttgttttcttttgaagtcatccatggcctcttgtggttgcttttttatgcttggggattgaggtctctttaattaggtgaggttgggtcctcagctgcctctccttgcctttatgaggcaacttgaagagggctagtgatcctgaatttggaagagaataagggaagacggtgagaatattgccatttcgtaatcagttccctcttactatctttcaggctaagaatatcagccttgacagaatggctacacccttacctcccactaacgtgggtgtccgcttttgagaaattatttagattgtaattttgttcttatcttactcctttagtcacttgtcacgttgacattccattttacataaaccagaatccagtgtctaactttaaaccacacattctagtgatttctttgcatgtgggtgtgcatagcttggtttcagaagttaggaagtggttagtcagtattctcaggggttaagttgactctcagccgtgggtgattagctattagctagatccctataattttcccatgacaaggatttgctagcctgcctcccgctcttgggaaaccgaaagcctttccttctggggagctagagggggcgggggttgttttccagagttacagctgagcagcttagggggttggcgctgatcgtggcttttcccaggtcccgttctggaaacatgttgcccatcccacccgcaccccaccctccaccctccaccctccacgctccaccgggaggctagttgatgtttctccctgccttcccccacccttgttaaagcttggctcttgagaaggcaattaaagtttcagagggcttgaaaattcaagggagagtggtttgagacgctgccccctctcccaccccagatgaaagttgttgtatttgtttttgtttttgcttggggatcagaggcactatttggccccaaaagagtatgattaatcaaggtgcttatataaaagaacctcaactccgccaatactagataaattaagcagactgctttcttttttttttcttttcttggcaaagcaagaaatcactataaattagcacacagtaatgggacacaaattatggagttggttccaagtgttgtcatttccttctccttccctatagaagtgggtttagagagcctactctggctttggccaagggagggtgcccctttctctccttgtttttttaaataaagcgtcatcgtgaggcagtttcctgctgcacttggtggcttgttgcatttctgtgcactggggtcatgactttctgtgcagacaaagagcagagtggcaagtgcagcgtctgcagagactttggcatagctctcttgtcaccgagagagtcctttcctctatagtctgtcgcaactaggtgcacgggttgatttattccatgccttcacctttggctcactcgtgtgagcctgagaagagagtggctttgtgaagggcatccccatgctggcctcttcccaaacagccctccttttgtcaggagtcggctgggaggggacctcagctcaactgtgaaaatgtttgtttatacggagcccctgatgagccttgggagtctaccttcctgtccccagaaacaaaacagaaaaagcctggactttgcagtcttccatttgaattgtacaggtgtctcttaacgttcaaaaggctaacctggaggtgtgctgtgtgtctccaggtgccagtacggctggcaaggcctgtactgtgataagtgcatcccacacccgggatgcgtccacggcatctgtaatgagccctggcagtgcctctgtgagaccaactggggcggccagctctgtgacaaaggtatggcccttagggatgagacccagggtgggatctgggggtgggatggcactaatttggtttctaattttattggcaggggcttttattctgaattctccttgaatgctgtgtgggttttctggtttttctttttaaaagacgactggggctagaaacatggtgggttcgccatcttcacaggcgtctcttagtgactccaggatctttttggcagatctcaattactgtgggactcatcagccgtgtctcaacgggggaacttgtagcaacacaggccctgacaaatatcagtgttcctgccctgaggggtattcaggacccaactgtgaaattggtaagtggtccaagatgaatgagagccctttgtctaatttttctgtactcagcttttaaaaaatatacttaaggacttgtttaaggaaaaaaaagtgaaaatagcttccaaagataggccttatcccaaccattctataagcctttgtaactttcaagtctctaaagttttttgggtgatgctgattcgtataggaggcagcgggagatgaaatgaccccagctctgagatgtcttggaatgtggttagagacagctcagcgagaaagatgacttcctttctttcctagacacagcagggttctatcacacgcttgcttttggtttttgaaatatgcttgcactagtggctgtggtgtgggattcggttggaggggggtgtggggaggtaacggtgtgcaggcatccctctctgactgccatcctggtttttgcagctgagcacgcctgcctctctgatccctgtcacaacagaggcagctgtaaggagacctccctgggctttgagtgtgagtgttccccaggctggaccggccccacatgctctacaagtaagtccaattttcagcctgtgtccattctaaggatccttgtgccaagataccacgctggggagaggtacctaggcttgtccagtgtgaatgtctcggtgagagaggggcgggtgcaggcctaagtctggtaagcagtctggtggcttgtgtgtttggaagtctcccagcacccccatcctgtcccactaaggtagcgcatgtatctgttcttggaaggaacgtcctcgtggaatcgcttgttcctttgcatctgcttcctggagctggccaccttccaattgtggttattcttcttgcagccatggagaggctgccttcaggggaggttgtcacttactactggattctgtcatagggccagggggccccagagaagaacctggcctgcagagttcctttggctgtgagacagggctgtatatcagaatcacctgggctgctttacagtgtaaatctctgggtcccccagattccctccagaatcggggagtccatggtctttgataaacttctggaattctgcagtgcagccaggtctgagaaccgctgtcatcagcaccccaggtgtggttatggatgtggatttctggggtcagattgcctgtgctggtcctaggcccccacctgtcacttgcggaactccagcaggccacagaagctccccgggccctctttaaatggcacagtagcaattcccatctccgaggttgtcataaagacacaaaagtgaatacttcataaattgttaggagttgtctctggtcagagcagaagtggagaatgcagcctctaggtgtgctattttgggcaaactctgtaagcaaatgagaggaataaggttttccacctgtaaagaactatttttcctgacttcttagctacttctgagccatgatgaaacttttctttaaaaataaagattaggcagatagagatgtcctgtgttcctcctgggcggatgctccgtcagtatccagctgtctttctcccccactgcttaggttggggattacatgaactggggcagtgggggatttaaagctaaaatcaaggcttcggccttatcgtcaccgtcccacttgtcctgctgtagctttccttgtagcaggtgtctggctcttcaatgacagcccctcatgtaagaggtgatgttaaaggatctaattgtcagatggattgaattaaattgtcaaccccctccttttcttgttgaccagacattgatgactgttctcctaataactgttcccacgggggcacctgccaggacctggttaacggatttaagtgtgtgtgccccccacagtggactgggaaaacgtgccagttaggtaagaacatccctgtgactgtaatttttataccaaggttggctttgattgtcaaagccattacagaagacgagcgtgtggccggcagtgtgagttcacactccatcatgctaagaagtaatttattatcaagagtctagcaggcctgggagaaataacttgaatgcaaatggactagctcttttaggccctgtgggaaagtcgtgggattccttgaaccatgtcaatcgtctgtccgaggagtgttcagctgggttccaaaaggggatgatctcatgaggaatgagctgtctgcattctttttgccacatttaaatcccagcaactaggctgcctgggttttgcacagaaatgcctggtggctttctgctgttttgttgggggctggttaactagcagctggaaagttatcaattagggttcttattggataatagctagggagagggatcagatgcttaaaatagagggaacctctagtatcttttatttagctagcttattaaaatgtctcatgtctcagacaaactctggcctgttctttttttttccaaggtgggggagatgggggttgaacttcatttctcatgctcatccccatctcctttcagatgcaaatgaatgtgaggccaaaccttgtgtaaacgccaaatcctgtaagaatctcattgccagctactactgcgactgtcttcccggctggatgggtcagaattgtgacataagtgagtgactttgtttccattttgattttcatgaaacttgggtagccgacttgctggtccgtactggggctccagtcctaggacttgagcagtagaaggaaaaccttagagtgggaatggttttttgagagggagtggtcagggcagcagtgaaaacatacactttatcaggctcattagctgcgaaaaccagccatattctgataatgtggctgaaacaatgatgtgaagtttcactccctcattctggaagaattagggagggtccccacccagcgtaataaccttatctcacggaaagcacacaggaaatctgatttgaaacttatctatcctgagctgagaaggcttttcaattaagcccaatttcactgtaaattacctctttaaaatgatgacttatttattttttagatattaatgactgccttggccagtgtcagaatgacgcctcctgtcgggtatgtaaatctttgcttaaatcaaaactttgacaattgacaacaaatctttagatttgtgcgacactaggagagctctgtccctgtgagatttaaaaatttgggtgaaaaaagagtctcttggaagtttcgctagggcttatgttaccccagcctcgtgggagtcattttgaaggcatgcacatagaaattcctctaaccactttcagaggtttagcatttggctatttcagtgaaccagctaaaccgcaacagtcatgctaaaccgctgaagccctgtgtttgtggaatacatagaaaaaaagcatgtgtctctctctccccttctcctcttctaggatttggttaatggttatcgctgtatctgtccacctggctatgcaggcgatcactgtgagagagacatcgatgaatgtgccagcaacccctgtttgaatgggggtcactgtcagaatgaaatcaacagattccagtgtctgtgtcccactggtttctctggaaacctctgtcaggtgagtggtggcaaaacctcagatggccaagtttttagagcagagccgctgcctcctccgcttccctttacttttccctcagctcttgtgtctggaatttcctaacatctattaacatcctattgatgagagagtctctgctagacaaatgctggtggaaggagatactgacgaattattttcttcttagtgtcttcgtctttgtgttctttttggttccctccaccccctcttgtgctccctctcccactctgccccgttgtttcaaatactggacattggcagtccctacagcatagagatgtatcttacagggtgtctcctaatagaaaccgaaggaactgtcagattccagtgcctgctgccccagagaagttatcgtgacacctttgttttactctgatccctcccccttttcgctgttcctgatatttgcagctggacatcgattattgtgagcctaatccctgccagaacggtgcccagtgctacaaccgtgccagtgactatttctgcaagtgccccgaggactatgagggcaagaactgctcacacctgaaagaccactgccgcacgaccccctgtgaaggtacctcccttctcccgggacctggctgtctccagacttgctccttttgtccccacttactaccactgccccttgttacacttgagaagtaatgtattggtgaggaggacctctatagtgaaatgatcctgcctgtgtagcgggccgcaacacgtggaaacaatctattccggcctgccagtgggagagccgtgtctacaagtagcccaggggagagaatgtgaaatccatttagcattcctgttctggggtgggctgatgtgcaacgctgaggcaaatgcctgagaacaacactgtcaacagaacttcctgcaacggcagacagagggggatgttctgtatctgcacggtcaggtatgggagccccaggccatgtggactgtgactagtgtaactagaaactgattttatttcattttagttcatttaaatgtaaatagccacatgtggccggtggctgctgtattaggcagcacaacatttaaagcttctataagattgtccttgagccttgcttaagatcaaaaaggaagtaaataaagcaggtccttttgccttagcaagtgtttaccaaattgggtagatgtcaaaggtaggatgaaggggatccacaagcatgtgggttttcctggttgtgtggagggagaaaatgctttaaaactctttgcctggagtctcaactttgcctgtcataatgtgatgtggcacgttgccagtatcttggcttccctggggtgtgtctcattagccagagggtccctgtctccaggaaagtgggcttggcccaggcccttggcttaggaatgccgcatctgtgggtgcatggctgtgatctgatcccaagcctatcttctagtgattgacagctgcacagtggccatggcttccaacgacacacctgaaggggtgcggtatatttcctccaacgtctgtggtcctcacgggaagtgcaagagtcagtcgggaggcaaattcacctgtgactgtaacaaaggcttcacgggaacatactgccatgaaagtaagactccctcatccgggaatggaccagtgctccccagcctgcccctgcccctgcctctgcccctggcccaccctgggatcattggtgttgaaagttttttttttttttttgagaccgaatttcgctgttgttgcccaggctagagtgcagtggcacgatctcggctcaccacaacctcggcctcccaggttcaagcgattctcctgcctgcctcagccttcctgagtagctgggattacaggcatgcgcaccacgcccaccacgcccagctaattttgtatttttagtagagatggggtttccccatgttggtcaggctggtctcgaactcccagcctcagatgatccaccccccgacccccaacttggcctcccaaagtgctgggattacaggtgtgagccaccatgcccagcagtgttgaaattgttttaatcagaaacagtaaggctggggagactggttgagacttatccttacatctgggatctaagactgaggtcgtgttcaatttaccagatcactctgcctcggagcctccatatctatgttggaacattctggaatgttgctaggttgggtgattcctcttttctgtaggagtttcttccccactttcacctagtaccggtgactaaatgcccatgtgagggcattaagtgggtaaggcactctctggaagcttctgcttgataagccgcctgtctaatttgagaaacagccctgatggagggtagcaggtggaggtgccaggtgcattgtgtcaggagggagccatgaaaactgctgaacagtgcttgtctatggcttcacaagtccttcagttctttttttgctttactttgtttcatagatattaatgactgtgagagcaacccttgtagaaacggtggcacttgcatcgatggtgtcaactcctacaagtgcatctgtagtgacggctgggagggggcctactgtgaaaccagtgagtctgccactctttggggagctctgggatgtatgggtcatgttggagggatcccacttcaacgtgggaaaactttctttgtactggaaatctctggaagcaagaccgcagtgatttctgcactgggacagtatcacttgtgtctcatttgcatttatgagtcctgatgatagcttatggggaggagcttctgctgaggacctatagaattagactgtgtaataaatattcctgcttgcaaggaaagtcatatttctactttcatttccatgggacttccagaggcccaccccacatcttgcctaacttgtggcattcaaagtaacccagttgggagctcctttattcctggaaaagcctgattgtgttaaagtactacgactgtggctgttctcagaataggatgttggatgtaagcagtaggaaaggcttggctctcgcctgtcgtgaatggtcctggatctcgtcttcagccgattgtctcccctttgattctagatattaatgactgcagccagaacccctgccacaatgggggcacgtgtcgcgacctggtcaatgacttctactgtgactgtaaaaatgggtggaaaggaaagacctgccactcacgtaagtggtagttggccttggatgctatctctgggacccttccctctgtcttctgtgggagggggccactgggactcacactgaaatattttcctccaggtgacagtcagtgtgatgaggccacgtgcaacaacggtggcacctgctatgatgagggggatgcttttaagtgcatgtgtcctggcggctgggaaggaacaacctgtaacataggtaactttatgccccacgtgggatctgcagtgggcatggccacctgggcgtgtctgctggttggcccctggagcttatgatatttctctgggcctggttcttgcccctccagactgtttctggatactcagggagggtggtcgtgtctgctcttcttttatagcccgaaacagtagctgcctgcccaacccctgccataatgggggcacatgtgtggtcaacggcgagtcctttacgtgcgtctgcaaggaaggctgggaggggcccatctgtgctcagagtgagtgtcctccccccttgaactctcccagggctgtcggagcagatcctgacacccttggggacttgcaatggaaaccagaagcagagctgtttgatgtctgcttttgtatcacctgggtctgcattaatgacttgatgggatacagccctgacctgggcatgagaaagtcgccaataagataagtggagacagatggcgtctcagttcccagctctgggtctgaccagcagcctgtctccttccattctcacccccacccctatcccctaccagggcctcttcctgtgtacatgtgtcccacagcaaatgaaactaagtgtggtgcgggcctggttccaatttagcaaaggtattttgctggtgttaactacgactttatcatttgggtattaggaaaataagtggtggttttacttagggctaagaccgctttccctgttgaagtcctcactattaagttgtcttttctttgcagataccaatgactgcagccctcatccctggtaagtgtgacatccttttaagccagcactcatccactatcgtgtgtgtgtgtgtgtgtgtgtgtgtgtgtgtgtgtgtgagaatcacccagggattgtgtttaaaatgcaagttctgagtcaggaggtctggggtggggcctcagactgcttttctaacaagctcccaggtgaagcgatcctgctgccccatggaccacactttaattagccaggttgtgtcctcatttagagcagtgatttttcaaccttggctgcacaccagaatcacctgggagcttttaaaaatcccgctgcctgggctgcaaccaagacctgtgaaattagactttctgggggtgggacccaggcatcagtattcttttaaaattccccaggcaacggccatggggtgagagccactgactgtaactggtgtggtgacatgtgagtgattggcagccagagtaatggactgggaggttggtaaccaaggtggtctttgctttcttagttacaacagcggcacctgtgtggatggagacaactggtaccggtgcgaatgtgccccgggttttgctgggcccgactgcagaataagtaaggactgtctccgtctggttttcccaatggctttaccgcttcattccatgcctcaccccaagactttcatctttaaaaacaaagccaccattccctttaagtagctctcatagagcaaaggatctctctcctccagctgggattaagatatgccaggctggatcctcccaggtacctgctggtagttccctgggtggtgtagccctccttgttcttggggagagagtgccagtcacagaatctgatgattaatctacagtggggtcctgaagaaagtatgtgcatttccccatgactaacatgaaattatgggcaagcagatgttaaccacagctacactggtataggataaagctaatacaaacggaagggaggacgactgtggcttccagaggcttgtctgtgctgggtctgatcaggccctggagaaatgactaaaacaggaaaataggggcaggcaacgcagtttttcaagaggcttaaagcatattattttgagccttttctctacttttttacaagccctttctcttacagaacaaaaaaggtgctagagtagttatggtttgattcttgtacccaaattgtctgaaattttactggtgcttgaaatccaagtctgggattaactagtcttcagcactagatgggggcaggttgtatctgtttcatgtttctaaataaacagttggcaaactgtggcccaggggccgtatccagcccactgtctgtttttataaatacagttttcttggcacacagccacacattcatttatgtattgtctatggctactttcatgataccacaagagttggatagttgtgacagagactatataccccacaaagcctaagatgtttactgtctgaccccttccaggaaactttgccaggcttgctgtaaattgcactgtcaaaggaatcaaattaaaaattgctgcctcccaaaatggttctccactgttagaactcaggatggtggtggtctttgggagccagtgattggaggtttttgcaatagatctgtttcttcttttggatgctgcttacctgagtgaaaattcatcaagcttatgatgatatgcttttcttgtatgttatgtcaataaaaacaatctcaaaacattgccacacaccatcagtccctaaacttgaactccatttctcctagacatcaatgaatgccagtcttcaccttgtgcctttggagcgacctgtgtggatgagatcaatggctaccggtgtgtctgccctccagggcacagtggtgccaagtgccaggaaggtatgtgtgccaggcttcagctgcccatgggtcttctggggtgagcgagctttgcagtcaccatttgacttttcacaaataagccactgtgctcagggaagggaacacacagtgggactacaagggaaagggaacgtgaagagtcttccccaaaacaggtagctgttgtttttggtcagctgttgccacaaaactgtgtaccaaaccatcccaaactgctgtggcttgcagcaagcattatttttattgctcatgatatgcagcatgggcagagagattgcgctgtgggttgggttcagttcgaccagtggctgtgtctggggcatattcctttcatcgccagtgggtaggtgtgcaagaggctagtcaaaggctctgctcacatcacatctgccaatgttacattggccagagcaagtcttgtggccaagcgcagagccagcaaaggcaggaagtacacatgctgttactgtgggaagaatgatcttaacatggcaaagggcacaggcataaccatttcataacagggaccaaagaattgaaccccgatccggttcacagaaaaataaactgctcacccgtctccacctgtcagtttcagggagaccttgcatcaccatggggagtgtgataccagatggggccaaatgggatgatgactgtaatacctgccagtgcctgaatggacggatcgcctgctcaaaggtaggacatgatggctgccgcagttcacctgtgttctggaatcagggatgagcatgcctgctaagctgccagcttctgtttttctccaggtctggtgtggccctcgaccttgcctgctccacaaagggcacagcgagtgccccagcgggcagagctgcatccccatcctggacgaccagtgcttcgtccacccctgcactggtgtgggcgagtgtcggtcttccagtctccagccggtgaagacaaagtgcacctctgactcctattaccaggataactgtgcgaacatcacatttacctttaacaaggagatgatgtcaccagtatgtaacaacctttgttttttttttgaatggtggatgtctgcttgcttgctttaaaggaggaatgccatgagctaggatctacttctccctagcttacattcctgttttataataaagtaagcttgaacttagccagcctcaaagagaacatctcagccttttgttcttcctctcaatcttacacgtgtgtgggtttttaaaaatcgttttagggtcttactacggagcacatttgcagtgaattgaggaatttgaatattttgaagaatgtttccgctgaatattcaatctacatcgcttgcgagccttccccttcagcgaacaatgaaatacatgtggccattgtaagtataagacccattcacacctcattattcgatggcaaggcagttcggttaaccagtgtctgaatggagcaaattcactgacaaaaagctttgcagacacagattgtcgagtaattttgaagaaaggctgctttgagtattcctctgactctcaagtctgacaattgtttttccagtctgctgaagatatacgggatgatgggaacccgatcaaggaaatcactgacaaaataatcgatcttgttagtaaacgtgatggaaacagctcgctgattgctgccgttgcagaagtaagagttcagaggcggcctctgaagaacagaacaggtaggtgtcaagtgggactagtttgtgtgatgatagtagatgatctcattatactattcaataaagccatcaggtcgagggattatctggcagtgccctaccctcgcaggagctcccaatttaactgagaactgagggcagcctactttactaaggtcacatggcccatgggaacagaggtctgcctcatattttccttcccaacacactatgcaacgttccctgcagaacaggtattgtgctagatccgtgacaaagccctaggacactgcttgtcctttgtccttgagtttgaagctgtacaaagcctgacttggcattttggtgtcctgggacagcctagccactgctgagctctgtgaggctcgatggccccgcaggggtgtccaggcttccctcctgaggatctcgagcaccgtttcagccaagggagagattgggcatggagccatggcacgtttgagctgtctgtgctaatttgaatcggatttctagttctgaaaaccaactcctgtactgagctgcctcagtagccagacttaacaagacactgctctccccatgcgaagtcaaagagcctgtaggagctgccgctccacccagtctctccagggataagagtatcaaggtctacaggggcctgatcccagcatttgcttatcaagttgtgaagtgaccatatgcaatgatgaaaagggacttgtccctgtggcccccctcttagggataaagggcaggagaaccactgttggtattcttttgttcctgcgatgatgcttttttctttctttcttggagagttaattggttttgtgcctgccttacagatttccttgttcccttgctgagctctgtcttaactgtggcttggatctgttgcttggtgacggccttctactggtgcctgcggaagcggcggaagccgggcagccacacacactcagcctctgaggacaacaccaccaacaacgtgcgggagcagctgaaccagatcaaaaaccccattgagaaacatggggccaacacggtccccatcaaggattatgagaacaagaactccaaaatgtctaaaataaggacacacaattctgaagtagaagaggacgacatggacaaacaccagcagaaagcccggtttgccaagcagccggcgtacacgctggtagacagagaagagaagccccccaacggcacgccgacaaaacacccaaactggacaaacaaacaggacaacagagacttggaaagtgcccagagcttaaaccgaatggagtacatcgtatagcagaccgcgggcactgccgccgctaggtagagtctgagggcttgtagttctttaaactgtcgtgtcatactcgagtctgaggccgttgctgacttagaatccctgtgttaatttaagttttgacaagctggcttacactggcaatggtagtttctgtggttggctgggaaatcgagtgccgcatctcacagctatgcaaaaagctagtcaacagtaccctggttgtgtgtccccttgcagccgacacggtctcggatcaggctcccaggagcctgcccagccccctggtctttgagctcccacttctgccagatgtcctaatggtgatgcagtcttagatcatagttttatttatatttattgactcttgagttgtttttgtatattggttttatgatgacgtacaagtagttctgtatttgaaagtgcctttgcagctcagaaccacagcaacgatcacaaatgactttattatttattttttttaattgtatttttgttgttgggggaggggagactttgatgtcagcagttgctggtaaaatgaagaatttaaagaaaaaaatgtcaaaagtagaactttgtatagttatgtaaataattcttttttattaatcactgtgtatatttgatttattaacttaataatcaagagccttaaaacatcattcctttttatttatatgtatgtgtttagaattgaaggtttttgatagcattgtaagcgtatggctttatttttttgaactcttctcattacttgttgcctataagccaaaattaaggtgtttgaaaatagtttattttaaaacaataggatgggcttctgtgcccagaatactgatggaatttttttgtacgacgtcagatgtttaaaacaccttctatagcatcacttaaaacacgttttaaggactgactgaggcagtttgaggattagtttagaacaggtttttttgtttgtttgttttttgtttttctgctttagacttgaaaagagacaggcaggtgatctgctgcagagcagtaagggaacaagttgagctatgacttaacatagccaaaatgtgagtggttgaatatgattaaaaatatcaaattaattgtgtgaacttggaagcacaccaatcttactttgtaaattctgatttcttttcaccattcgtacataatactgaaccacttgtagatttgatttttttttttaatctactgcatttagggagtattctaataagctagttgaatacttgaaccataaaatgtccagtaagatcactgtttagatttgccatagagtacactgcctgccttaagtgaggaaatcaaagtgctattacgaagttcaagatcaaaaaggcttataaaacagagtaatcttgttggttcaccattgagaccgtgaagatactttgtattgtcctattagtgttatatgaacatacaaatgcatctttgatgtgttgttcttggcaataaattttgaaaagtaatatttattaaatttttttgtatgaaaacatggaacagtgtggcctcttctgagcttacgtagttctaccggctttgccatgtgcttctgccaccctgctgagtctgttctggtaatcggggtataataggctctgcctgacagagggatggaggaagaactgaaaggcttttcaaccacaaaactcatctggagttctcaaagacctggggctgctgtgaagctggaactgcgggagccccatctaggggagccttgattcccttgttattcaacagcaagtgtgaatactgcttgaataaacaccactggattaatggcctgtagtgtcgaggtgaattgtttgtgagcaatcaggggaactggccacagcactgaaagggttttaaagggtttggaattggtgttgggaaacgagcagggagatttaatgtctgcctcttttttttccctggctacttagattcatattaatgtcctgttgtaagggtgtggtctgaaatgactcttgtgcacatttacccatggggtggtttcctcacggcacaggaggtggtagttgcaagcttctggtgttcgggctcatcactcatcaccttgttcccagggaatgagtgttctggcctcaccatgcagccttggagtgctggtgttctggtcttctgtgaggttccagagttgggctgtccccacctgtcacgggcaggagaactctggttctctcacttgtggctggtggaggccctgcccccgcatcgcgtggtggggtgtgggagaagctttgcctctggcacctctgcggaaggaataagctgtggtaacaagcacatggacagcttccagcagccgtgcagagtcaccaggactctgcttctggctaggaaagccaaagctcacccttctcagagccatcccccagcacttcaacattcaggcctgtccacccacgtccggttttcatacaactggcacagcagactttgaatggaggaaaagctgatggggatgtttttctttgttctcggggaaacattttttcttctaggcttggagttgtgctaaggaacatcttaagaatgaaagatgagctttaagtgtcctgggatccttgtgcatgagcagaggccatcgagggatttgggattgtgacaaccctaagagggccaacactgttttggctcattggggaggtggcctgaaggacccggacagcgaagagttgaggtttccatgacatctccctgccctagcgtagctccgctttctcaccaatgtctgccagtagacagctgggtttccacaaggtggggtcaaagggagggagaaatctagatcctactagccaggagacagtcatttcgcagcagtggagtcaaacactatcctgaagcaaaaccttgttctggtggtttgtaaacttggattctgcaggaccccagaattccttgggtagctgccagatgcttttgtgccaagaaaaaaaaaaaaaaaagttgaatgagtctctgcaattctttattccaggagggaagggatcttgggattcatgggtgttgtcttaactcaccttctgtctgggacacccctggtattgggagggcatagatcagcctcctctggatgtggctcagtgccaggactttaattgtgaagggtggattttccccttccttcaggaagaaggaagcaggcaatggtgctctggttatcctggggttaggaaagttgagaggaagggactcagtgcctttaccattcattccccaggaacgccctgggctctctttaaaggggccctggaagaaaaaattttcagtccagaaacttggctaactagaactctagcattagaatatcccatgaaactccaggaaagaacacttaaagctggtgtttttttaggatgggaagctctgtcctgagattctatacttccatgatgtagaatttgaatagaaagtggagggggaggatgtatcttaattgactaaaagccaaaggagactcagtggtgatttgcgagagggtttacagtttgaagatgcagatttccaggactggtccatgaccctattagaccagatgcaccagaagtggagcctgggaatttgaatttttgacaagctcgctcttcctccccgactcatgcactctaaaaattgggagcaactctgctaaagtgctacagtaccagctcttaactaattataatgtttttcttccttgttaaactgaattaaatagcctggaagccagtttgttgctaaattgccacctgacatcatttttaagtaaaatgattacaccgccccttgagcaagatgtggtctaagtgcttcatgcctattagctgatctgaggggtcagtgagtcaaaatgaacttattctgtaatatttcttaggtagcaaggagcaaaatgggccagagcgtgggtttcccacctttccaaatggcttacacctgtctgctccaaagtgagcaaaggtgcagcaaaaaaccagttgcctttaaaggaaaaaaaaagttctacaggcctttcgggctttgaaacttgggctgagcaatgctccaccatttccgtttcgactgtgggtctctttcttgcctctactgggaatgagaaacaggagttcagaggttcctggtctgggaagacatacaacaagcacatgggttatgggaagcctcctcctgctaatgtgtatttatactttgtaagctctgattcatccaagcattggaacagaaatctgcttcctgaggttctgtttttaaatagatagtttgcaaaaacaacaattatttttcttaacattttttttccaccccacaagcagctaaacatcccagctcagggtatgtcagtctccagcaatgccaacaaacagcttggttatctgagctagaagggtgccctgaggcagttctctacagttctggccccagaagtcttaaaaacaaagtttagaaaccattagggcaatcttgttgcatcacttcaaatccacgaggtatttcggggtctattaaaaataacgaatttccgtttgcgaaccattgccttccaatggctgttaaaataaaactaagagcaggttggggggagtgatgcttgtagggccgccgtggtatcgctgcctggcagccgaggagcctaaaccctgcccggcagcctctgagatcatgtcaaaagggtgcggctctcttgctttggacatatattctacctgtattacttgctcttgcatgctgggcacaaccttcctggcttagagtgtgtttctttcaagtccaagacagcttttacaagtctcaaattatgtatcattatgcctgggtccagtattaacctgtgatacgcaagtcaggaaaattaacctggagaataaaggctcttaaatccagtaagaaccttgaattgaggtctgcctgctgccttttccaacccacccgcactgcaaatatccacaccagggcacccaagggttgagttatccagaaagcaaacgcagatgccagcaacatgaaagtaacagctttgttttaaagagaagctctcttggcagggctggtggtgctcatcggtgatcctcgggggaaatacaagtttgcagctggcttcctaatcactactcagtcaaccaaacaggttcgccccctctgttctgcacctgaagagtgaaaagctgttttagttcacccttgctgagatatgtgcagttgaaatacctttatcatagatgttacatgtgaaacacctttatcacaggatgttaatgcaatcaaggaccttatccatcaaaggatccaacccccactactttcccagaagaggaaactgaggcccagagaggttcaaggacttgtctgaagttatacagagttagcaatagccagaactagaactctgggctcctgcttcttgggctgctgtgttttctgcctcttctgggaatttgcgaggtttatgccggcatcctgcccttagtgtgattttaaaaggtaaaaccttgggagatcagcacttcacaaaaatggatgcaaagtctcaagggaggtcacaggaagcgactgctacgacagtgtcgccaatctgaactggttctgcctagaaagtgacatctgtataaacccaggagcaataggtgttttctgcatcaaaggaagattaagccctgctcctttgtaggctgttcctttgttcttgggaagtttctgatttcccttttagtttttgcttcatagaattaaaatgagttgcaggaaaagaggttcagaaaggaaatcaacagcctcactaggtcttattgctgcctgtgtgtgtgcacgcatatgcacacatgcacattttacaggtgttttcagaaccacactgctgctcaccggggctgagatgcaggtgccagggtcctcgccagtgtcaggtgattgcaattatcattaggcctcatcccacgttctctaaccactcccactccccctggcagcttccttccaggttatcaccacaaaaacacctgagcatttaacaggactaaaatccagatcgcttgaatgtgatgaagttcgccacgtccagtgtgcggttgggccagttcagacacacctgagagttcctggaactgcctgtgggcagctctgcttcctccacctgacatccccaaaaggctactcctccacaacctgtttgtcgtgtcagggtaggccagaagtacattctatgtagaagtttcctctgcgcccaggcacccacactgagtgacttggaaaaaccccatccccaagacagaaacataaaccctccaagttcaggacatgaacaatcagataccctcaggggctctctctggctttgcagtgatgttactttagaagaatttttaaagaattcaaggcataaagcagaaaggaagagcgcaaacgtgacatgtcctacaggtttgcaacaaactaagaaaaaagtgcctctagtaaagtaaagggagtgggaaggggccgggagggaccacaatctctggctttctccacctccacgccctgtcatttccgtgcttcctgtgagctctcagtcggacagtgttggctgcagtgcagttacaaaagaggtcctgaacatctcctgcagagcattcagcctccacgtgggcctgacccttccttcactggactgttactttcaccctcttggtgtgcaaagccaggctgtgtgcttagtggtcaagagcatgcattctggagtgaaacttctttgattccaactgcagctcttccttccagctcctggtttgaaattttccacctgtgtgctctaacaacacagtttctgggctttgaggtttgccagacccagattctaggcactgccatttactaacttgggaaagtttccaaaattctttgtgcctcagtttcctcatctgtcatggtgacaataaatgtgtgccactatagttaatattcatgaaaagggctacaggtaaaggaaagaacactgctttcagtatttgctctaagtaaccattaaaagattaaggaattcagctagattccaactgacagtctactttctcaccgttacaccattaaactgggcctgtcagagaagagctaagtgctgttggatctggtcgtaggcaggactccacgatggctcccaaagctccctggtccctggttattcaatcaaacgctaatcctggtactgctgtgaagggattttgcagatgtcattaaagtctcaaatctgttagccttcaaatgtagattatccaggtagggctgacctaattacaggagctttttaaaagcagagagttttctctggctagtcacagaaggagaagtcaaagagattcaaagcatgaaagtgattcaatgccaaggtttctccattaatgaaatggacgaggtcatgtggcaaggacccgcgaaatggcttgtaggaagtcccctgccaacagccagcgggacaatgcggatcttagtcctacaaatgtaaggaactgaattctgccaacaagggagcttggaagtggacctttccctggttgagcatccagatgaggatgcagcctggctgacgccctgatttcagcctttgagaccctcagcagaggacccagctaagtgtcaaaaactgtgagataataaacttatgttgtcttaagtctctcaatttatggtaatttgttacacagggatagaaaactaacataggcttcttctaaaaaggatcgtaccagctatgtcacttgtaggtgtcgtatttggttgtgactatacaaatcgttgttagctttttccctgatcaattcagagccggcttccggtgcaggagaaagaaaagctcatttaagacaagaatgaactataggactgtacaaaacttggtgcctaattgaagtctacaacagtgtgtggtctgtgagtgtcgacagctgtctacagcctgcgaataatgagaatagaacacagtttttttcttctatatccctccaaacccctattttataaaatgtgtgccaaatgaggtaagctcagatacctggccttggaggactccaggacactcaagtcttgagatagttttctctccttatgaaacgagatactgttttgacttccattttctggaggttttcagtgggttgggcatttcagaaatactttgtattcccacctccggcttcctcagaggccttccctacaaggaagttccctgcttggccgtcgtcactgcacagtggccatttctttggcactgagaaggggctaaatgtgaagccaaactttctctcccaccatctctctgctaggagtgcccttgcatggagggcaaggcaggtggcctaggcagacttgcattgctggtagcagaaaattaaggtttctcttaagttcagtgagcttttctaaaacaacattattaggacctggaattagacttgacagacatgcaaaacaagagccaaagttgtttctacaactggggcccagaagaacatgagatttgataaactggtaccaggaaatgctatcttcaagggaaaacagggaaaatttgctgtagaaaattcacagatggatgcagagactccttgtctttgagcctgtgtaaagattttggtgacatctagaaggttctttccggtgaagatgcttattggcatcaaaacaagaaccccaatagcaacccagatccctgacacctctggcatagaaagctctgctgcctacaagtgccttcagattgattgatggggcattttcacaggagagccacctaagaatattcttttctagatgccccaggctctgccacaggcagatggcccacatgctgagcagaagggcgctgggacaaggctcactggggcagcattttaaggagaatatatcaatagagcaatgttgctgcttcacaaggtccttctcttgtgctgtgacaggaaggtccctctaggctcctcctactgggacacatcccaaatacccagcccagtctcccacctcctggctggaggctgccctgatttaccattccacctctccctctgacaataggaatggatgcgctggtattcatctttccaggcacccaccgtgggtttgggaaagagccttctgcgttcttctcaccagtcaagcatgtgaaggaggaactgaaaaggccttgggagctgctgggcctagaaaaattcccagtcaatccatcacctgcctcctctggagcagggtctgtcagtctctccactgttcctggggcaggtggagagagggatgtgaagcaacgagtggaaatgaggtgtgagtgtgcctgtgtgtgtgtgtgtctgtgtgtgtgtgtctaagcgcagaacaggactggtaacagaagtgcaggcgagagggcgtgggagactgggaactcatttataaaagctcttctgccctaaagcaagtcaaactccctgctgaggagttgctttttcttcctcccttttgagtcttgtgtgctgaactgacctctcccctggcagaggtcagcgctctgctcaccccgcacacactcagccttctggggtttgatcgccttagagcctgaagaggagagaattcttcagcattaatttctaagagaaaagccatagtaaatcttgtgaagaagctggattttttttttaaagaaatatatatacacgttatgataaaaaatctttcgggaactgtgcagaaaacaaaaagcaaacataaaaaccatacatcattatatagccccctcccacagcctacttcactcctaaaataaatcaggctgggtaatgaatgaggttttaagaaatgcaactgaacttaaaatacaaggtcagtatctcatcctaggtaatcctttggaggatgagaaattctcctgattttcccacagggttatttcagatgcactttctgagccaaactattttaaaagcattcattcttccactgccctgccaaatgctaacttgagattcacacgcacttttagagagagcctattaatgatattaatgatcatgatcaaaggcaaaccccagaggtttatgtaaaaatttcagacaattatttaggtgctttaaagacccatcttctgaacgagggtaacaatttctcaatgttggcaaagatgatgggtgcgttgggatgtgtaggttctaaagcagcagaaccaatgcagaggggccttcagaagaaaacaaaacacatctctttgtaagattaacatgtatgactgttgactgacaccttgtccccaaagccatgcctactcatttacttgaaagtaggtacacttctgatttgcagaaagcccctcttctaaagaatactcagcgaaccctgtctcttttaacatccgctatttacatgcacacaccacatttttaaacaatagttctaactatggtgtctcctgagaatcattatttgatgagctttaaaaataccaacgcccaggccaaacctcagggattctgattgaactagaagctatccaggtgaccccagtaggtggccagtgtagagaaccattttcaaacagatgtagacattaatacatgggaggggaatgtttatcccgatgcactaaaagctgtgtttggcacttaaaatattagagataattttatttgacagatgaagaaactgaggcctgggaggttacatgacttgtaccaaaacatataagaccaactagtggcaaagcagcagcctggacccagggattgcagcttgcagccccatgctgttaggcagtccccagatcccaggcccagcccccatgtccagggcagggtgtctttcctgtgggttaggccagacagcgggccaccatgaccaaaacactaggaagaaatgagctacgcctcatcgactgcagtggttctcagcattgcacgcacagctattcaaatgtattattccaacctgactaaactgcttctgaaaagttatgtacaaaactagagaagcctgcagtactgaaataaaaggcagtgtagacagtcagcccaggacttcatcagttctgagtaaagattagattcacttggaaaatggaaatgaatccacttggggaatgtcaagatccttggaaaggagtcaaagtgccatagtttaatcttgccaaagaggtctatcttagctcttagttggcagcagaattgggaacaagtccacattgtaaggagcaccccaaaatcttaggggtcaatttaatccaaatgtttcatgctgggttttcaatacctaaatctttaaggccgatggttaaatggaaagctcctttgattattttacacagtattcaaaactgcagaattatttcaacaaagaaaacacaaacacttcttacaaatagagcataatttaaaatagctgtccagaaaagggcattttgaatatgcatttcttggggttaattcacttgtttttgaagaacagaagtgatacacattaattttttaaaacaattttactccttattcataaaacagtacatttctattacataggtttcatcccctaggcatgcacaaccatttgaactatttaaacagtttataacaaaacaaatgagaagataagggaaaaagagctctcctggggacttacatagctgtttggtttttcaacttgattgaagaaagttattcgggggatctgtccaattcacaccttctgttccctgatcaaatactttagggtcaaacataaggttttattgatttttgctcaagcaaagaattaacatttttgataaggaactgtaatggcaattataaggtaatatggtgtatggtaatattatgctgccagaggaaacatttgactatgattaaattcaagcccagtactgggtagctctagataattaaagataattttatccattcaagtcccctctgttaagctgcacattgacacatatttgttccctgtcttgtaaataaatatagaaagcaaattagagtgagtcctgcagatttctgagaatttaattatacccttaaattgcaataccaatgatatatacggttagatttctgtactgagtaattacctgaattaacttcgttttacaatgcttaatttattttgtactaaggaaggcttttaactatttaagataaaccaacctaattttgattttttacttgcttcaacgtgtttcagttcattaatgtttcaataataaggaatgaattctcttgtcttgacaaaccaagcatggaaatttccccataagagaaaagaagaaattaaaatgatttccatattcaagtcacagcacgctgaaaagagaactttgagttcttaggaaaggcatctgttacctccaaaggagggccactcattacagttttgtgtaatattacagtaaggtctgccaagaaggaattcaaggaaattgggaatgacgacactgtgatcccaggccactctcttgagcagaggtttccttcccttatgtgttctgccctcgccaagctctttctgaaatcagaggccactgacatgcataacaaaccatgctaaaatccaaacatgacaccaacagcaaacaattacactgtgatcccattgtggtccccaagatatatcttgagatacttcagagagaagctatattcttcataaatcaaaatacagagggtttttatgattcttgctttttataaaatgaaatacacttctatagtattaaaataagtgaacaaaagaactacagcacttactcccctacccccaaatgtttgcttctttgcatttcacaattcatatgcatatctggacgacagttaacctccagtggcaaagataagaaaatgtgaaagaaaaatcatacagattgttcccagacctttcttgtttatggacattaaaataacctcaacaccaatctattaagatgccatctgaaagcacatggaagtggcttagaatctatgccgctgagaaagttaggaaattcaaagttataacattaatcaaatcatatcaatgacttctccaagcattggagtcacagggacttgaatataatttggggtactacgcaagtggttgaagaacttgttctttttgactaacaatactgacactgtttcagactttcagatgccaaattattaagatcattaagaatgtcaaaacaggccgggtgcggtggctctcacctgtaatcccagcactttgggaggccgaggcgggcggatcacgagtcaggagatcgagaccaccctggccaacacggtgaaaacccgtttctgctaaaaaaaaaaaaaaaaaaaaaaaaatacaaaaaattagccgggcgtggtggcgagcgtctgtagtcccagctactcaggaggctgagacaggagaatgacgtgaacccaggaggcggagcttgcagtgagccaagatcgccccactgcactccagcctgggcgacagagcgagactctgtctcaaaaaaaaaaaaaaaaaaaaaaagaatgtcaaaacacataccattcccaacagtgagaactcttcatatcctacctaataagcaacaacaacaaaaaacccctggcatccatttacccctttgtacttccaaatatccaaagaatcatgcaaccactcaaataacaagagagccaggggtgtttcagccatgtgcaagaaaaatgcttaaaggcaaaattcctcaaacacatgtcacagtgtgggaactgagagccattccctctgtaaatcctgttaaaatcccttttacatgaagggacgtgagggctgtgaggaaaactacatctatctacaaccaaaggtgctattttttctcttcgatcacagtaattgttatatccccaactataacaaactctaaagccaagacttttcctgacagagaatcattctaagtacaagtactagccttaaccaccaagcccaggttagctaatgaaataaaaatttctcaataccagagtgatacttcagagaaagattagaagaaaacagaaataacaaaaaaccaacagaacaaacaaataaaaacttctcaatagaaatgttctctggtggctccagctcaaatatctcccccctagttctggagcaggcagtggctactgttctagtacagccgtctttttaattccagactcttccagagagctgcttcttggtctatcccctgggttacttattacttgtgccctccctatatctaaatcgttctaattgcttctgtttaagaagattcagtgacacactgtggtcctgtgttcaataaagagcacacctaaaatactgtttgctctaagagaggcgcctacagtgggccatggaaatgcacattctaccaggtactcggtttccactctgtgcagcccacccctattgtataagcagagtcagctccactgaagttagtattctgttgggctccctcttctcctatagaatcccctgactgggttccgctgggagcaggaaaaaagccaagagggaagaggacaggataccagtaggaagggctgtttcaagtgggggtggtgaggctgggatcatgggacaggaacaggtttctaggcagggtttggaacattaaagtaacagtatctaccaccacagtcaggcttggtgaccaagatggaatttcatgacccaaaatggtgccatgaaatatagctgctgcttcatgagtcttactggtcttaacaagtggggacaggagatacgggaaaggatagaacgggatggaataaaccactaatccatctcaagcatgaacctacactatgcctgtttctgtactcttgtcattgttttgggcttttctgggtgatttttctgctaacttcaacactttagggaatatacttggttttccttattacttaggggaggtgccatttcaaaggaccaccccatgttgaacagaaaaaaaaaaaagatgtattgaatgaatggaccttgaatattgtttctttcctcttttagagtgaaattcggttattggaaacttttagcgggtgtccatccaaaataagtcattgctacaattcactatgtgacatttcatcaagcccactggagacagtgggtgacattgtaaagggaaggctcccatcttgaaatttgaactgcctgcgaagccttccaactgggaaactggaacctggtcactgagttcctgttaggttatagtctgtcccaaaccaaaatcctggaggtgggtgcaagagcagggactgggacatgcttgagctacaggcaacaacgagcctctctgatgtcttctcctaaggttgggcagaatcgcccatcgacttcaacaattataagggaaagtaacaccttcatgggtgccatggctgccatactgtagaacccggaagagagtgacccatacaccaaacccaagtgttttacgagtttgagggagtccgaggggatgcatgtgcacatctggccccaactggtgagctggaggccatggcaaccaggctgcaggaagcactggggagtgttctattagtccagtggttctcaaacgcgagcatgtttcagaatcacccaaaggcagttactcagcatggggcagggcccaataaccacatttctagcacatttccagacaacgaagctggtcccaggaccacgcgctaagaaccactagcttgttctttcactgccctcctactcaggctgaggagcagggggatggattgtacccctggagctgaaaggcagcacggcagcactgtctttgcacggtccattgtgtggtctgcacagtgatgtgccaagaaggggctcatgatcagtttcttcatgcagtccttgcacagtctcctccctgacaaggtggatggctctttgtcattactaattctctgaagacagtcataaaatacaatgataaagaagcaacgctgttagaacaagcatatagcctcccggtttgaaatgctttgaaaacaaaccatagccataacacagataacacacttcctatttaaattagtcattctaattaattcctttaaaatcccggcatctatattcgcagctctcttgtcacaggtttggccactatgtcctcaactccaacggtacaaacctcttcggtgttaatggcctctttcgtatttctttcttttcttggttgggctgttctgaattgtagataatctttcagtgtttgtggctaagccggtttgctgtgcctgccctgggttatttttcataagatgtctggaggagagactttccaaaacatgcaactcttccttagacgtggtttttgccaaatcttgtttcaaaagtaaccctggatctgacaactctgaagctggcaaaaccctgacagctttgcttttttccactattatttctctcgggactaatcgatcacttccaagagaaactctcccgtggtggtcgaagtcttccgcagagctgcagttcctgcgtttctgttgggttttggccactcgtggactttgttttggacatggtgatgctgactcacagctacagacggggctcctgcttagaagccctgtctttaaccgctccccaggatgaggtttttgctggccactagtgtcttctggctgggtctgattaactttttccagcttttgaacaggaagcccccagtggctctcagctgcctttatggaatcctttgcttgtcccatggattctgatgggggactggaggaagcctgaccatcattcctcctccttgctatctctgcaatcactgagtcactagatgtttccacagtgtctcttctggtctgcgatttgctcgtgacactgctttttgtttcagttcttttcacactgaaacaaacaaaaatgattttatggtttgtaaagctgtcactgcactgtttcctccagattccctctaccacatttcctacacctgaaaaaggaggcaggcactacctgccctctcgcttccccagcaaatctggaaacactccccaccacaggtgtatgtttaaatgcagactgaatcaagcaaaaaccttcacatattccattatacatgatactgcttatcaatcattgggttaaaaatggatttatgatggcgttcacattttaactaaggtaaataggtattcatttccaatgttaagggtcagtactgcctatatactgattttttttttccaggagtagactcaggctctgtgtacacaaatgtacacatacacacaatttctacttgtgagtaaagaaaaatcttctggaatttctctcaggctatttcaagatgttacccaaatataaccaccatttagctggtatcaggtttgttgaccaaacttgatcaacaaatgggagtaggacttagttaatataatttgaaatgtcctggaagaaatttcagatagtcagcatgaaaggcaataaaatacaatcgtggaagacaaaagagtgtcgatatagctgtatataagccccttgctccttacagcgtgcacaacagacaatgtaacttcactctgatgataaagtgaactttgaggggcaggatagaagctgcacagggagaattagagactaaagatgttaacttcagcatatatttacaggtttgtgaatggcaagaaatttcctcaaccaccaaaacattgaaagctgaaatatttatttcggctagcttcagtgtgaaaacaaatacatgtaatattcatgttcttactgttgacaccaggagcatgaggattatcgtaattatattaaagtcggaacaaggatcctaggaaaggaatttttttttttctagatctgtctgtagtccctccgaaagtggtatgaaacacaccaccaacaggtgcttttcatcttcaaagaacgtgtcattaattactccttgcaacacacctgtgaagcaaggattctatccctattgtccagaaagcaagagagtcaggagggaggggagagtaagtacgtgacggaggggagtttgtgcttcagttccaggcactctgtttaattctggacttcatgttatctatccatacatagagacaggcaaaaatgagaaaaaggaaacacattgcacctacatttctttcagagcatttctccggagctttgcactgggaggaagtgaactctctgcacactcagcaaagtaatcagacactccatggagaactctttctgtctactccaaaagataacaaaggttcaaccagaaatctattagctgaacatgagagaaaacagttacactctgaatgccccaatgaacacatttatttttgtaaagactgaatgaaactgctcagtggtaagctattttaaccttttttacctaggactttatggttaattgtaacttcttttggactcccagtccacatttcatacattaacatgcgtcataaacatacaaaactgtaaggcaaataatgttgattccaaaccatctgggaactcttggccaatatctggtatctgtgaggctcaggctgtgacaaaagccccagaatcctactgtgtggggcaacgtgcctgtgagctctgttcttctagcaagacctggtgacacagtggtctacacccttatcatcctaagaattccccatattttctctatctgcaaaaacaaagaatattttgtggccgggtgcagtggctcacgcctgtaatcccagcactttgggaggccgaggcagccagatcacgaggtcaggagatcgagaccatcctggctaacacggtgaaaccccgtctctactaaaaatacaaaaaaaactagcgggacgtggtggcagatgcctgtagtcccagctacttgggaggttgaggcaggagaatggcgtgaacccgggaggcggagcttgcagtgagccgagatggcaccactgcactccagcctgggcaacagagcgagactctgtctcaaaaaaaaaaagaatattttatcacacccaagaccatagcaacagtcaaatcttttaatattggtattttgaaaactgtagtttgtgattcttggctaccaaaaaattcgggacttttttccttatactaaccaccactctggttttatataattcatagattatctgcctatctagccttttgtgttcccatggaagcatcataaggaagtaattataaaatgtaaaagcctacctaccttgccaacattaacccatttcatgcttttggaatctcttctccttttggttatcaagtagataatccatacaaggtgttaactcctcatattttctgagaaactaagtattcttctccatcaaattccaataaaatgttgctaccaccagaaacagctttagtaagttgtcagtaggtccttgctttagacctacactggaattagcagtgacagccccagagtacctggtgggtggcagccatgagtaccgtgcctggttatcctacaagccgaggggatgtgctttgcctaatcactgccctgcaccactgaggatgggctcttcacactcttcaattgtgcctatccatctcagacctgggccagtgtcactcaaagtcatatctggttataacccaagtgagttttaagctagtgaacagaatattctaggttttattggattttattggattatactccctttttttttgttttctaagacttactagttggccaaaatgagtgacagcttaaaattcaactgagagaaagagagagatcgagaggaatcgagatttatgtgtgaaacacttctaaacatgccctataagtacagtagattctcccctcacagccacaccctgtaagtgctgtattttcagagctgaacaattaacataaggagcatgagtcaggctttgaacaactctgtgggaaccagaaagccttttgctattaggaatgatgtaaattccccaaggctggaagaaatccacaatggaaggcagacagggtcataaataacaacaatgaatactgcatatgccacataaagtatgatgctgtgatagtgacactctttcaaatctcgtattaaattcaatcactgcctttatttatttatttttaaaattcagtttaaagagcactatgcatttcctatgggaacttcaaaaactcctttaagaagcagagcagtcggctctcatcccaaattcctctgacaacaatgggggaaaatgtccttggaagaaaaaggacaacagaaaaggtgataagagtgacaggaggaaatgtcctgttcaaaaagtgtaaaatctgtgacttagttttcaaaaaaaaaaaaaaaagaaaaaaaaagaaaagaaaaagaaaaaaagaaagagaaaagcaaggcggggtctcccgcttacaaattaaaaccacatttggcaatttgttgaaggaggcatatttacatttgtatgaagactgggtgggcaggaaaaaaaagattagactccctcttcagcccctgagctgtcaggtctcattagaaatctcttactctaacatttctagggtcaattaactcccctttgtctctaaatcagagcctctggtgctgctcccctcccccgcccccccaacccccaagcccccaaacaagtattccttaggaagcagctatcacctgggaacaggatttcctaaagggagtcatcctgattactaaaggcttctcacatctggcatcaaaatgcaatctgaggcttatccggaggcacaacgccaaggtgcagatatataatgtgtgctaagagggttgcaagtgccttctgggcttacgggacaaccctactacttttcagattctgccatgaataatgatcccatcatgtcttgtaaagaatgaagataaacccaacatattcaaagaggctaccaaagagctggccatccaaagtccagaatgggacattctgagtccatggagactcaggtattaaaaaattagattaaccaacaggatcttccagggccttcataaatgattccttacaacctggaaggtagctcttacacttgggccaaggaataaaattctacaaatatcattccttggtatactccatttccagccatctgcctcatgtccaccctacctcctattttgttttactttttggttatacttttaagatttttggttcaaaagtttctctctataaagaatgtcagtacacagttctagggcaaaaccaaacagaaatagggcaaagccctggcctctagggagataccctccctcagcaacctaagcagcctaggcaggccacaaggcaagggatcaggacttttctcgatctttgggggtactctggagaccagtaccccaaggatgaagacagtcaatgcacatgtcccagtacagaaccaaggggaaggctgaacagatgaatgtttgagtatgacaatgggtgatattaccctattcctgtatgggctgacctgggaaacacattttaaattccaggatagaaaggactgcaaagagagtccccaccaggatgagctaggtgcctaagatatccttcttgcctctaatcagagaacaggctgatttgagatgcagttagaaatactgggccaggcgcagtggttcatgcttgtaatcccagcactttgggaggccaaggtaggaggatagcttgagctcaggagttcgagaccagcctaggcaacatagtgagacctcatctctacaaaaaattagccaggcgtggtggtgtgcacttatagtcccagctactcagcaggctgaggtgggaggatcacttgagcccaggaggtcaaggccgcagtaagccatgattgtgccactgcattccagcctaggtga

SEQ ID NO: 5702 - DNA, 131012 bp, Homo sapiens
  TAF4 gene - 59983250 - 60074261 of chr20; NCBI Entrez Gene ID: 6874; Build 35; sequence includes 20,000 bases upstream of initiation codon and 20,000 bases downstream of termination codon of the gene
actgaaaatacaaagaattagctgggcgtggtggcgggcgcctgtagtcccagctactcgggaggctgaggcaggagaatggcgtgaacccagaagacggagcttgcagtgagcccagatcgcgccactgcactccagcttgggtgacagagcgagactccatttcaaaaaaaaaaaaaaagtaacgtgcataggtagaagaaaaacatccaaccgtccagaggagaactggcagggagtgcgactcctcttcagcctggctctacccctgcgtgtctctctgtgcagttcctcagtcaccctcagtccaggcttcctcctcccctgtgaactagcacacatctctagagaccctgagaattctgcaggctgactcaagtccaacacaggggcgctggcaggcctcccagactcagcccctccaagtcaccaggccccatccgcatctgctgaccccgccttgaaatcctccgtgacatttgaacaaggagccttcagcgtgacctggggctgctgtgacaaatcaccacaagctggtggcttaaaacagcagaccttcatctctcacggttctggaggctggaagtccaaaatcagggtgtcagctccttctggaggctccgaggagaatctggcccaggctctcctagcttctggtgcctttggcaaccctgggcgctccttggctgggggcagcagcacctgcccctgcctctgtctgtaagatgctcctgctgtgtatttctgtgtcaaatctcccccggcctcctcttagaagaactccagccactggatttagggcccactctagtccgggatgatcttatctcaacatccttaattacgtctagagaccctatttccaaataaggccacattcgcaggaaccgtgctgtcaggacttggagacacctatatctatatcaatatctttatctatatcaatacctatatctatgtcaatatctttatctatatctttgtcaatatctttatctatagatagacaatcttgaaaaactgcaactttatgtccattaaaaaacagctccccacttttccctctccccaatccctggtaaccgcattctactttctgtttctgtaaatttgaacactttaattttttaatgtttattattttatttgagacagggtctcacgctgtcacccaggctggagtgcagtggtgcgatctcaactcactgcagcctcgacctccctgggctcaagtgattctcctgcctcatcctcccgagtagctgggaccacaggcaggtgccaccacgcctggctaatttttgtattttttgtagagatggggtttcaccatgttgcccatggcaggtctccaactcctgggctcaagggatcctcccacttcagcctcccaaagtgctgggattacaggagtgagtcaccgcgcccggccttgtcaaattgactaccttagatttttctcatttaagtggcatcacgcagcatttgtctttttaggacttgcttatttcgcttagcacttatttattttctgatttttttttattatggtaaaatacatgtgacataaaatgtgtcatcttaaccatgtttgcaaagattttattttttattgacaaataattgtatatatttatggggtacaaagtgatgttttcagacatgtatacatggcggatgatcaaatcgggctaattcatacatctatcacctcacaaacttatcctgtctctgtggtgagaaaatggcaaacccactttttggcagtttgggaatctgtaatgcgttatttctcactcgagtcgccctgctgtccatccggcagagacttcttgtcctttgagtgaggtttccctttcccgcctgcccttgggtgcccaccattctcctctctgcttccaggagtgcttcagccagggttctccagagagacagagccatggagaggtgaggggtttgataggggacttgtctcctagaggtcaaggagtctgcaagccggagaaccggggagcctggcggcgggctcagtccaagcccggaggccttggaacttggaacctcagattgcagtcaccaatctgaggccaaagacccaggagccctgtgaggccccactgcaagtcccagatcccaaagccaaacgacctggagtctgatgtccaagggcaggcagaggaaaggtgtcccaatccggaagcaggagagagggagagagagggagagagagagagagagagagaaggagaaagaggaggggagagagggaaggaaagaaaaagaaggggagagagggagggagagaagaagaaggggagagagaaagagaggcagagagacggagagaaagagagagggagagagaaagaggtgcactccagcctgggcaacagagtgagactctgtctctgaaacaaaattaaaagatgaaaagcctctagagatggatgatggtgaggcagcgataccattatgaatgtacttaatgctactcgtacactgaaattgggtaagacggatgcccgaatgcctgttagaaaggctactgtcaaaaaggtgaaaggtaagtgctggccagacgtggtaacctgttcatctaacagcattagatgggtgttgtattagttcatgctcacatttctataagaaaatacccaaaactgggtaatttattttattttattattttttgagatggaatctgactcttgttgcccaagctggagtgcagtggcacgatcttggctcactgcaacctttgcctcccaggttcaagtgattctcctgcctcagcctcctgagtagctgggattacaggcatgtgccatcacgcctggctgatttttctattttagtagagacggggtttcaccatgttagccaagctggtctcaaactcctgacctcagttgatccacctgcctccgcctcccaaagtgctgggatgacaggcatgagccacctcgccaggccaacagggtaatttataaaggaaagaggttgaattgactcacagttgagcatggctggagaggcctcaggaaacttacaatcatggtagaaggcaaaggagaagcaggcaccttcttcacagggcagcaggacgacggagtgagtgcagcaggggaaatgccagatgcttataaaaccatcagatctcgtgggattcactcgttgtagcaagaacagcaggggggaaccacccccgtgatccagttacctccacctggtcccactcttgatatgtggagattatgggaattatggggattacaactcaacatgagattttgggtggggacacagccagaccatatcaggtatgtttggtttgagagaatgtgttgatgtatgtcacttgtcggaatatgtcacacttgaatgaaagacagtgagggaatgtccagctcttctgagcagactcagctttctgagctggaaaacctaaaacaaaacccttattttgtttgagaaggaaaccagagtccagagctggcaagtgacctgcctaaggccaccaggaaatggtagaatgtggaccaaaacccacgtttcctgaattcccagatcagcagtctctcatcaacatttttaaaaattgtagttaagaataaagacaaaatttaccatcataaccagtttcaagtgtaagttggggaacagtgagcatattcacgttgctgtgcaacagatccccaggacttgttcatcttgaaacactgaaactctacacccattcaaagctctccatttcaccctccctgccttgcctggtaaccaccattctactgtctgtttccgtcaatttgagtgctttcgataactcatgtaagtggactcacagcattcgcctttttgtgcccggcttatttcacagcatagcagcctcacggttgatccttgctgaagggtgtgtccgaatttccttccttttcagggcttaataatattccactgcacattttccttctccatttcatctatagttggaccgttgggttgcttccacctcttggctatcgtaaataatgctgctatgaggccaggcacggtggctcatgcctgtaatcccaacactttgggaggccaaggcaggcgaatcacgaggtcaggagttcgagaccagcctgaccaacatggtggaaccctgtctctaccgaaaatacaaaaattagccgggcgtgtggtacacgcttgtaatcccagctactcaggaggctgaggcaggagaatcacttaaacctgggaggcggaggttgcagtgagtcgagttcatgctgctgcactccagcctgggtgacagagcaagactccatctcaaaaaaaataataataaagctgctatgaacatgagcgtgaaaatatctcttcgagatgctgctttcacttcttttggatataatccaaaagtggcctcatcgacattcttttttttttttttttttttttcagatggagtcttgctctgtctcccaggctggagtgcagtggtgcaatctcactgcaagctccgcctcccggcttcacaccattctcctgcctcagcctcccgagtagctgggactatgggcgcccgccaccacatccggctaactattttttgtatttttagtagagacggggtttcatcatgttagccaggattttctcgatctcctgaccctgtgatctgcctgcctcggcctccctaagtgctgggattacaggcatgagccaccgcacctggccaacattcataagttatttaagacttgtaggttttactacctcaagcaaactgtgaggctctagagtcagacattgactatctaggtgggtactgctaagtgtttaataactgtctccctaaggaaaaaaagccccgaagcatagtgtctgccaatgccccccgaggcatagcgtctgccaacgtccttggtggaaatgcccccaccctggctggtttcaagctgtcagtgtgatgtcactgaacatggcgttgggaagagacacaacagctggttcttgcgagctggatgtggtgtatgtggcactcaagttacccatttttccttaacacttgccccagtgtgaaggcacacatgtcattgtggacagggatgactcttctcccatagacacaggaggacttggcagtagatgtgagccaggagcagttccagaatttgcagaggctggtgcaaaatgaaaatgtggtgctctggggaaggttgaatagtgtcactggaaaagatatgttcagggagagagaatgaggagttagtgtttaatgggtgtagagtttcaatcctgcaagacacaaagagttcttggcatacacttgcggtcccaactactcgggaagctgaggggagaggatcacttgagcccaggaggttgaagccgcagtgagtgagctctctcacgtatcaagagtgggaccaggtggaggtaattggatcatgggggtggttcccccctgctgttcttgcgacaacgagtgaatctcacgagatctgatggttttataagcatctggcatttcccctgctgcactcactccgtcgtcctgctgccctgtgaagaaggtgcctgcttctcctttgccttctaccatgattgtaagtttcctgaggcctctccagccatgctcaactgtgagtcaattcaacctctttcctttataaattaccctgttggcccggcgaggtggctcatgcctgtcatcccagcactttgggaggcggaggcaggtggatcaactgaggtcaggagtttgagaccagcttggctaacatggtgaaaccccgtctctactaaaatagaaaaatcagccaggcgtgatggcacatgcctgtaatcccagctactcaggaggctgaggcaggagaatcacttgaacctgggaggcaaaggttgcagtgagccaagatcgtgccactgcactccagcttgggcaacaagagtcagattccatctcaaaaaataataaaataaaataaattacccagttttgggtattttcttatagaaatgtgagcatgaactaatacaacacccatctaatgctgttagatgaacaggttaccatttatttctccattttactgttgatggaaattttggttgttcctgttttgaatattaacgtgctgctgggatgtccagggacttctcttggggcacagaaggactcatttcttctgggtgcatatggagtagagttgctgagccagatgctgagcagttatacaactttagtggaaatggccaagcaatttcaacagtggctgaactgactcctgtctcctcagtgagtgctccttaccaacactaggtgttgtcagtccttttaattttggctgtgctggtgggtctgcagtggttttaattcaaattcccctgatgactaataaggttgagcatctttttacacccctgctggccatctggccatcctctttgtgaagtgcctgttccagtctttcgcttatttttgtacagtgcatatgtcttctactctgtcagctgtctttccattcttgtaatggttttgatgagaggttcttttttttttttgagacaaggtctcactttgtcacccaggctggactgcaatggcatgatcatggctcactgcagactcaacctcctgggctcaagcaatcctcctacctcagcctcctaagtagcagggactacaggcacatgcatgatgcccaactcattttgtactttttgtagagatggggtttcgccatgttgctcaggctggtctcaaactcctgagctcaagtgatctgcctgccttggtctcccaaagtgctgggattacaagtgtgaaccattgcacccagcccatgaagagttcttaacgtcacacaatttatcaattttttttcctttatagggtttagcactttttgggggggatgggacagggtctcactctgttgcctaggctggagtgcagtggtgcaatcatacatcactgcagccttgaacccctgggctcaagtgatcctcccagctcagcctcctgtgtagctgggactacaagtgtttgccaccttgtgtggctaattttatttatttattttgagatggagtcttgctctgtcacccaggctggagtgcagtggcgtgatctcggctcactgcaagctccgcctcctgggttcatgccattctcctgcctcagcctaccgagtagctgggactacaggtgcccaccaccatgcccggcaaattttttttttgttttgtatttttagtagagaggggtttcagtgtgttagccaggatggtctcgatctcctgaccttgtgatctgcccgcctcggcctcccaaagtgctgggattacaggcgtgagccactgcacctggccatgtctggccaatttttaaagttttggtagagatgaagtctcaccatgctgctcaggatggtctcaaactcctggcctcaagtgatcctcccatctcagccttccaaagagctaggattactggcgtgagccacggtgcctggacaggtttagcactttgtgtgcttacttttgagagaatttttgccctaagattaaatgcatgcttcattctaaaagttttgcctgttatttgacagtctacaaagaggttagaaagtttcatttcaatattttaaagatgtttttccaccctcttctggtttccatagtttctgacgaggtcatgagttttgattctttgttcccctgcctgaacaattacagttcactctagcctctcactcctggtcaagtgatcctcccacctcagcctcccaagtagctaggactacaagtgtgtgccaccatgcccagctaatttttaaactttttgtacagatgggggtctcactatgttgcccaggacggtctcaaactcctggcctcaagtggctcccccaccttagcctccaaaagcactgagattacaggcctaagccaccatgtctggccttgaaactgttttgaggcacatatcaatttatcatttctttcttcttatgagttaaccattttatcattatgcagtgtctctttttatctctgagaaggttctttgtgttgaagtttattttatttgatgttaacatagccacctagccttgctaggcttactgtttgcataccatatcttttctaaagcatctctcttgaaatctgtagtcttgtctttctatcctttttaattgacgtgcttaatgcatttaaatctaatatgatgattaaggcctggcacggtgactcatgtccttaatcccagcactttgggaagccaaggttggcagatcacctgggtgtatcacctgaggtcagaagttcaagaccagcctgggcaacatggtgaaaccctgtctctactaaaaatataaaaattagctgagcatggtggtgtgcgcctgtaatcccagctactcaggaggctgaggtaggagaatcacttgaacctgggaggcagaggttgcagtgagccgagatcacaccactgcactctagcctgggcgacagagtgagattccatctcaaaaaaaaaaaatctaatatgattaattggtggaatttaggtctatcattttactatttgtcctatgttcattccttctaaaatttcctctttttctgcttttttgggattatttgaaaacttttagcattctattttatctattggatttttatctatacctctttgtgttgcttttctagtggttgctttagggattatcatacacattcttaatttataatagtcttctttaatattgtgccacttcatataaaatgtagaaaacttccaatatcatagtttcattttttgctacagttgagtgtattccatctacagagtcaaaatctcacagtttgatgttgtaatttttcatttatactgacatatattttaaagtaagaggaaaattgttttttaaaatttaatctactatttaccatttctgatgcttttattctttcctgatgatcaaatttccatctgggatcattttccttcagcctgaaaaatttcttcagcaattctttttttttcttttttggacacggagtatcgctctgtcgcccaggctggagtgcagtcgcacaatcttggctcactgcaaactccatcttctgggttcatgccattctcctgcctcagcctcccaagtagctgggactacaggcgcctgccaccacgcccggctaattttttgtatctttagtagagacggggtttcactgtgttagccaggatgatcttgatctcctgacctcgtgatccgcctgcctcggcctcccaaagtcctgggattacaggcatgaaccaccgtgcccagacagcaattcttataaaacaggtctggtggtgatgaattatgtcaatttttttatgcgaaaatgtgtttatttaccctgtttttttttttttttttgagacggagtcttgctctgttgcccaggctggagtgcagtggtgtgacctcagctcagtgcaagctccgcctcccgggttcacaccattctcctgcctcagcctccccagtagctgggactacaggcacccaccactacgcctggctaatttctttttgtatttttagtagagacggggtttcactgtgttagccaggatggtctcgatgtcctgacttcatgatctgcccacctcggcctcccaaagtgctgggattacaagcgcaagccactgcgcccggcctatttaccttcattcttgaaagatagttcgacagtctacaaatgggttaaaaagttttacttcaatactttaaagatgttcttccactctcttctggtttccatagtttcggatgagaagtcatcagttttaatttatttgttcccctgcctgaaattttcttttttttctcttctccagacaaagtttcactctgttgctcaagctggagcagttgcatgatcttagctcactgcaacctctgccttgggttcaagtgattctcctgcctctcagtctcccaagcagctgggactacaggcgtgcaccaccacactcggctaatttttgtatttttgtagagatggggttttgtcatgttggccaggctggtcttgaactcctggtctcaagtgatcggcccaccttggcctcccaaaatgctaggattacaggcacgagtccctgcgcctggacttgaaatgtgtttttgtacagttacttttaggaattttgtttttagatttgctttccagcaacttgactatgatgtacctacacatggttttgtttgagtttatcccagttggggataatgaaacttcttaaatatgtaaatttgtctcttattatagaaattctaggcagtgtttcttcaaatactttttcctgcctcatttcttctctcctctctttttgtaattttgactacacatgttataggctttttgatattgtttcacaggtcctgaggttcttcttgttttccccccatcctttcttttttagattggatacattctattgatttatcttcaagttaactgagttaatctccactcttctgttagactcattcagttaactttatatttaatatattctaatttgcagttctaaaatttccattttaaaaatacagtttctgccaggcatggtggctcatgcctgtaaccccagtactttgggaggctgaggcaggaggattgcttgaggccaggtgttcaagaccagcccgggcaacatggagaatcctccatgctacaaaaaatacaaaagagttagctgggcatgctggcgggagactgtagtcccagttactagggaggctgaggggggagaatcaccgtagctgagaggtcaaggctgcagtcagccatgattgtgccaccgcactccagcctgggcaacagagtgagaccctgtctcaaaaaaaaatgtttctaattatctgttgcgattttaaaatcttgttaaaagtgtatttttggctgggtgcagtagctcacacctataatcccagcactttgggagtcagaggtgggtggatcacttgagcccaggagttcgagaccagtctgggcaacatggtgaaaccctgctgtctgtaccaaaaaaaaaaaaaaaaaaaaaaattagccaggtgtggtggtgcacacctgtagtcccagctacttgggaggctgaggtgggaggatctcgagtctgagagtcaaaatctgcagtgagctgagacggtctcactgtattccagcctgggcaacagagtgagactgtctcaaaaaaagaaaagtgtatcttcctttacagcagcaattacaatagttgctttaaaatccttgtttgcgaattcatcaatctgagtcctatcgggtcaatttccagtaggatggagaatgtataacaatttttttctttgtatattcagtaattttgaattttatcctgaacattgtgacagtttggagtagagcattgatatgtgtgtgtgtgtgtgtgtgtgtgtgtgtgtgtgtgtggtagcaaacaatcggcttgatggaactgagactgcaaacccagtcccttggacagtggctcaaatctcatttctgttgttttattctaggtcgagttgcttggagtctgtcccatacatgtagttcagtgctcaactagagatttagacaaagagtatcaacagaatttggatctgcagctctctcctttctgcgatgctcccatactttcaagaggttgtggttagttcaactagcaaaaagtttgctagtgggtcactaggggtgatggtgagtggtgccacttccatttccaccccttgatttctggtcctgtgcatcctggctatgggagaaacagtaccatatgtcggatgctgattcagagcatgcatggccttctggagaactctgccccagtcttgcaaagtattctcacctagttgccattgtgaccgtgacttcaaaaggccattccaccattcaatcaatccagctgctttgggatggtggggaatgtggtacaagcagtgaattccacgagcctgagtccactgctgcccttctttagctgtaaagtgagtaccttggtaagaggcaatgctgtatggaataccatgatggtggataaggcattctgtgagtccacggatggtagtcttggtagaagcattgagtgcaggataggcaaacccatatctggagtaagtgtctatactggtgaggacaaaccacagccctttccatggtggaagagtttcaatataatcaacccgccaccaagtagctggctgatcaccccacttctggtaccaatgtactgtatgatcagcgttctctagagggacagaataggatagttgtatataggaaggggagtttattaaggagaactgactcacatcatcacaaggtaaagttccacaatatgctgtctgcaagttgaggagcaaggaagtcagtagtggatcagtctgagtcccaaaacctcaaaagtagggaagccgacggtgcagccttcagtctgtgggtgaaggcctgagagcccctggcaaatcacaaaggccaagagtccaaaagccaaagaacgtggagtctgatgtttgagggcaggaagcatctagcacaggagaaaaatggaggccagaactcagcaagtctgctcattcctccttcttctgcctgctttattctagccatgctggcagctgattagatggtgctcactcacattgagggtggggctgcctctcccagtccactgactcaaatgttaatcttctttggaaacatcctcacagacacacccaggatcaatattttccatccttcaagccaatcaggttgacactcaatattaaccatcacacttgtcttctagcttttctagccagaaaaacctatggctttttattggagttttatttgccctgcatggcatggcctgttacctgactttagtctaggagctgtgaaaacccggtaccgttttcctcttccaagtgttgacaccttcagaatgtgcctgctgtgttcacgctctggtgacttcaggtaagtgttgtttcctattttgcccagagtttatagtgctgcctttggaagggttagttcaataggcgtttactccaccataccggaaacagaagcccagcttgtccatttctgtaaataaataaataaaaaagcttggatttaaatattcattttgtgtacaatctgtagatcattttgggagaaatgacatttttacaatattgagcctctgactctttttttttaaatttttttattatactttaagtactagggtacatgtgcacaacgtgtaggtttgttacatatgtatacatgtgccatgttggtatgctgtacccattaactcgtcatttacattatgtatatctcctaatgctatccctccccgctccccccaccccacaacaggccccagtgtgtgatgttccccttcctgtgtccatgtgttctcattgttcaattcccacctatgggtgagaacacgcggtgtttggtttttggtccttgtgatagtttgctgagaatgatggtttccagcttcatccacgtccctacaaaggacatgaactcatcattttttatggctgcatagtattccatggtgtatatgtgccacattttcttaatccagtctatcattgatggacatttgggttggttccaagttattgtgactagtgccgcaataaacataagtgtgcatgtgtctttacagcagcatgatttatagtcctttgggtatatacccagtaatgggatggctgggtcaaatggtatttctagttctagatccctgaggaatcgccacactgacttccacaatggttgaactagtttacagtcccaccaacagtgtaaaagtgttcctatttctccacatcctctccagcacctgttgctccctgactttttaaagatcaccattctaactggtgtgagatggtatctcattgcggttttgatttgcctttctctgatggccagtgatgatgagcattttttcatgtgtctgttggctgcataaatgtcttcttttgagaagtgtctgttcatatccttcgcccacttgttgatggggttgtttttttcttataaatttgtttgagttcattgtagattctggatattagccctttgtcagatgagtagattgcaaaaattttctcccatcattctgtaggttgcctgttcactctgatggtagtttcttttgctgtgcagaagctctttagtttaattagatcccatttgtcaattttggcttttgttgccattgcttttggtgttttagacatgaagtccttgcccatgcctgtgtcctgaatggtattgcctaggttttcttctagggtttttatggttttaggtctaacgtttaagtctttaatccatcttgaattaatttttgtacaaggtgtaaggaagggatccagtttcagctttctacatatggctagccagttttcccagcaccatttgttaaatagggaatcctttccctatttcttttgtcatgtttgtcaaagatcagatagttgtagatgtgtggtattatttctgagggctctgttgtgttccattggtctatatctctgttttggtaccagtactatgctgttttggttactgtagccttgtagtatagtttgaagtcaggtagtgtgatgcctccagctttgttcttttggcttaggattgacttggcaatgcggtattgagcctctgactcgaacccagtgtatccctctgtgtattttttttcccctaatttctctcaatcatggtttacaatcttctgactataggtcttacatttctttttgttagtttgatattcaggtatttggtttttgatgctcttgtaaagggtcttactttaaaagtttcattttttacactcaaattgacgcttgatggtcagcatctattatcttagctttatatgtcccatcctaactatgcttactgagcaaactttaccaatgacaaacctgtggtttgttaaatcttccaaagcacctgcaatggaactaaaggtttttaggaaggtggtttttttgtttttgtttttggcaggggggcagtgtcttcctctatcacccaggctggattgcaatggcacaatctcagctcactgcaacctctacctcctgggctcagtagctggaactactggcacttgccatcatgcccggctacagtttgtatttttgtagagatgggcttttgccacgttggccaggctggtcttgaacctcagatgatctggccaccttggcctcccaaagtgctgggattataggtgtgagccactgcgcccagccaggaggtgcttgggttttataaactgggtatgtgaacagaatatggggaaagttattttaggaagtaaccaaagcaacaatagcactcctaagaaactcctgggtggacctcgtgcttagaaagtggagcccagtagcgttgcacctttccaggttagggaggagtctagaggccacaggcttctctcaccggaaaggtcatttcttgcttgcaccttgggaaggaggaagcgtcccaggaaggctgacttgttggagtgccatcaggacaacgccgtttactcctgagctttgaaatgcgctgctgtctgagttaagctagtaaaatccatccgcgatggctatggttagccatttgtgggagtcagccaagaggctgttgtaaatgagtcactcaagagtttgcagacagccccgcttgggagatctgggtcaatttcagggaggaagcaggcctgactcttgactataatttagtgagcaggcatctaatccgtggcgcctggtgtgtggatgcatgggctggtcaactgcgcagtgccagctctgccagctttggggtccaagtccaaggtttctgccccttccaagaatgaaacctgggctgctgacttaacttcaagctccagtcccccctcatctgtacaacaggctccacctggcccttgatcacgtgtcaggcctgattaatgctagtgcctggccaagccctgaccctggcgagagagtcctggccgagcagatctgagaatcctcattttcttgggaaagcagggcaggggttggaggtgtcttggccagtggacttctctactccggaactctcaagtcacaggctactgtctcaggctccagcctccccagacttgtgtcccagggtgaaggggccaggctaagtgcctcttaccaaaggtctccctgtaagtgaacagtaagtagccatcccgtatactagcttgaatagtgtcccctcaaaccatatccaccagaacatgaggatgtgaccttatctggaagcaggggctttgcagacataattggtaaaggatctcatgatgaaatcgttttggatttagggaggtcttgaatccaatgactggtatccttataaaaggagaggacacagacacacagggagaaggtcaggagaagacagagactggagtgatgtgaccacaagcccaggaatgcttggagccaccggaagctggaggaagcaggaaggatcctcccctagagcctctagagggagtgcagccctgcccacaccctggttctggcttctacagctgtgagaatccacctgttgttgaagttgcatacgtttgtgatcattcgttaaggcagccttgagaaacgcatccctctgcatttacagagcaattaggtggccacaagtttctccctgggatgtggattcatttgtgaccagagacatcccccctgagtctgcaagactgacgaacgctgccagcggggctggtggacaccccaaaaacattcagctgctatctagctgcacgcctttttctttgcggagtgggtggggggaaggggtctcattctgtcgcccagcctggagcgcagtggcacaatcatagcagcacgatcacagctcacttgtagccttgaactccagggcccaagtgatccttctgctccaatctcccaaatagctgagaccacaggtgcacaacaccacgcttggctaattaaaaaaacctgtttttagtagagaccgtgtcttgctttgttgcccaggctggtcttgaactcctgggctcagaccatcctcctgcctcagcctcctaaaaccctgcagttataggcgtgagctggcgctggctttttttttaaaaaattgttttatgatgagggctgtcaggcagacaataaaagcacaggtcacctaacaaacaccacagaactttcacacagcctgcagcttggaaatcactgattccctttattcttagatttgttttattcttaatgtgtcttaaacttaattcaaaacttgtttttattattttttatatttaagtgagcgtgtctgatgctctattttatttaaaaatacaagaccctgcttagtaaacttggaaggcccactgagctgccagccgccgaggccacctctttgcccacagcctggcagcaaacatttttccgggttgaaacagtgcttatgattaacatttgttacaattcccccttttctctttttatgctgggtgagatttttctttcaaactacacaagtcctaactgcttggggcaacaactaaaatcacagagatactaaaatttggcgggaggcccccagggtgactccccaccacatgaacattaggaggggaagtcacgtgctgtcctcacccgcctcccctccccccccccccggaaggcagtgctcctgcaaaccccagacatagaagagctgcctggctgtctgcggctcccactttccccagggccttctggtgcccaacaccctccttgcaagggaagctggaataggtgggcacagacccttaacttctcgcagttcctgcagctgccaggctggacggttccccagaagatcctgcgaacacgttggaatgaaagactcctggcggggccttggagaagaggagtcaccactgtgcgtagatggcaggagactcattacagatctcagtggagtagcagcggacttgaagagtggaggcctgagcgtgggaaccttcagttaccccagcctttgggaccctgggggccttggaacctggtctgtttcctgcgagtcctgcgttctgcttctgccccgactccaatctgaggggtctgtgggtatgggctgtgcagtgagcctggtgcgccccaccttgcaagttgtgcgtggggccagttagcctgcctgtgctttgacctgctttaaaaatgttctaattagttgtcaacactcaaaaattaaaaatcccgagatttaatcatcactttatatttctgttctttctggaaaactcagactgtccccctactgagctcaaggtgctccgtaggtgtacccacaggggccctccccgccatactcagcttgcttcattcatttcctttcctgccttctgggagccaaagttcaggtacaaaactccagctgtacgtttgcagtgatttcccccaaacactgttcccctataggggaggcacctctcctaggctccgtcctcaatgctcattggctgctgctgctgtcgagaaacaagcctggggtgaagtcccgtattccagttatcagtaagtccattcctttgcaaggctacagttcgaacaggcacaagggtccagttcgggtctgctttcgagactagcagtctcctttgttaaagcaattaaaaaaatcattttctttgtcagcaacgtcattcatcgtcccgaggtctctgcttattgcggcgctgtcttcagctgcgaagactgaccctgtggcctcttggccccagtgaggtccgaggcaaggaagcgtctctctgaaacctattctgggctcttaggaagaaatgagagaaaggaaaaccactagaaatgtccaataacaccatcttttggttggaaaataaaacacgcagaaagaggggactggaacttttactgaagtatttctagagagaaggtgcttgggaacactttaggtaacttactcccctcccccagcagaaggtaaaaaaagctacttccagacgtgccggcttcaggctcgggaacttcgtttggcgcctggcaagcaccgtgctcttacctacgggcttatacgacactcctgtctccaaggcagctgggtgcggggacagtcagcccggggcggctgggtttattgattaaaaatggagggaagggccaggggtggtcacgattggagggcgagaagagccgtgcgcgcaggacccctccccaccgcccgggaccggctgagccagaggcggacccagcttccccgcggcggcttggaggggccgggcgccggtccccgtccccagggcgcgctgcgacagtcccctccccgttcccgcccgcctcccaggcccatccactccagggcctgcgcgccgcccggcggcgccccggcatccccgcgcgctgttccccgggcctcggacgggccctgcgccgccgctgccaccgcgcacggcgcccgcccggcgctcccgtcagcgccgccgcagccattttggagcgagccgagacaaagagcgaggccccgtcgccgccccgcgcccgcctcggcccggcccagcgcaccgttcccgcatcccgcgccccgcccggcggccccctccccgtccgccaccgccccggcgcccgcgcccctgagctccagcccccgcgcttcccgccgctgctgccgcaccccggccgaccgcccgcgccccggcctctagcgctcgcagccattggccgcgccttttaagcgcgcgccgcagccaatcgccgggcgcccgcggtctccgcgcctgcgcagggccgccacccccgctcccccgccccccggccgcgcgcccccgccccccgccggccgcgcgccgccccccgcccgcccagcgcccgccccagtcggaacctcctcctcgcccaggcgcgctcggcccgagcggcggcggcggcggcggccgaggaaaaaagatggcggcgggctcggatctgctggacgaggtcttcttcaacagcgaggtggacgagaaagtggtgagcgacctggtgggctcgctggagtcgcagctggcggccagcgcggcccaccaccaccacctcgcgccgcgcacgcccgaggtgcgggccgcggccgccggcgcgctcgggaaccatgttgtgagcggcagcccggccggagccgcgggcgcagggccggccgcccccgccgagggcgcgcccggagcggcgccggagccgccccccgcaggtagagcgcggccggggggcggggggccgcagcgcccgggccccccctcaccgcgccgcccccttgtccccgcagggcccgcgccgcccgccgcgaagctgaggccgccgcccgagggcagcgcggggtcctgcgccccggtgcccgccgccgccgccgtcgccgcggggcccgagcccgcccccgccggccccgccaagcccgccggccccgccgcgctggccgcccgcgccggccccggccccgggcccggccccggccccggccccggccctggccctggcaagcccgccggccccggcgccgcgcaaactttgaatgggagcgccgcgctgctgaactcgcaccacgccgccgcacctgctgtcagcctggtcaacaacgggcccgccgcgctgctgccgctgcccaagcccgccgcccccggcactgtcatccagacgccccccttcgtgggcgccgccgcgccccccgcgcccgccgcgccctcgccccccgccgcccccgcgcccgccgcccccgccgccgccccgcccccgccaccccccgcgcccgccactctggcccggccgcccggccaccccgccggacccccgaccgccgcgcccgccgtgccgccccccgccgccgcccagaacgggggcagcgccggggcagcccccgcccccgccccggccgccgggggccccgcgggggtcagcggccaacccgggcccggcgcggcggctgcggcgccggcgccgggggtcaaggccgagtcgcccaagagggtggtgcaggcggcgcccccggcggcgcagaccctggcggccagcggcccggccagcacggcggccagcatggtcatcgggccaactatgcaaggggcgctgcccagcccggccgccgtcccgccgcccgcccccgggacccccaccgggctgcccaaaggcgcggccggcgcagtgacccagagcctgtcccggacgcccacggccaccaccagcgggattcgggccaccctgacgcccaccgtgctggccccccgcttgccgcagccgcctcagaacccgaccaacatccagaacttccagctgcccccaggtgagtggccgcacggggcgggagggaagggcggctcccagcagcgccagctgccagttccaggaagttctccgctggtggaatgctaaggtcatctgtcccgtaggcccgtggctggagcaggccgaggggcagtctctacccaggtgcggggccagcccgggtggctgtctgcgagtgagccagagggagtcggcatagcctgcgtccctgtcgctgtccctgacgtccgcgctggctgcctgtgcctggggctggtctgtttcggagtggctcagccaggactcttagtggagtggtccttacctgctcccgccctatgcgtccctgcccgggttggtaggctcagcgcaggggctccctgggccaggcgatggggtctgcagagctgagggcagtacctggggctgtgagtggcagcagctgtcccctgctcagttctgcagttaggcgtgtggcctgtgtccccacttagcctttctgccccttggtgaccctgggctcgagcctcttcagtctccaggcgaggacgggggcgcgacgccccctccttgaggctcgggaactctggatggaaggcttgggctcctctgctgccaccaggcagggagagatgtcaggcgcatcctgcgagagtcctcccggcgcgcagccttgctgagagccacgctgtggagtagggtttcagcaccgtgtgtgtcactgtctcttccagagctgcgttggtgcctaaaggaaggagcgcctagctactctggttgctgccccctcgggagggcagtgggagggcggtggcagcagatgttctcgctccgtgcaggggtctcggggcgatactggctatgctgcggatgcctggggctccgacgccacttccgcctggcagttctcacgctcctgtctagtctgctgtctctgcgactcctcagggcccctcaagtttgacaggaaagattgcctggccagcattgctgcttttgtctggggctccccgtccctccccagccgccgtggtgggtgctgggcaggggagctcctccccggcctgtggtgacgcgtgccgtgcagttgtagcagcgcggtggcagcagtagtaggaactgcaaggagagcgtgggtccctcctgcgtcccctctctgaatggagctattggtcactttgacagggttgcagaatcttcagaagtgaaaggatttcttgtccaagtatgtgaggttcggggctggtggtcagactctggacagggcaggggtggggaaagcctgtctgggcggctgctaggctgcagtgctccagggaggaagagagctgtgaagctacttcccggggttgctgagacgccctttacgacaagcttttggggtactgaagcgtttgtaggggtgttttgccagaggcttggttttgctgttatgtgtatgttgaccttttagtaggaaacgtggctgatctttagtaacgttgtaaaaagatgtttgatggctgtgatctattatgtaaactgtcacaatgctttatttataaaaatgtttttccagaggtcccacgtgtctcagcgcaggccaggtgcctgttgcacccctttgggtaggtattggactctgtcttgtggggctggccaggtcctcttgctctgagccactgcagaggtaaagcctcatctgtctctttcttctgggaggaggtgaaggaatacgtggttggaagagggcatctctgctgtgtttatcatgagtgatcctgggactcacttccatcttctgttttaagatcagttttagggtcgggtgtgtttgatgaagagacaacttgaaaaacaactgtaggagtgttgactgtgcgtgattcctgtgtgtgaggacagaggaacagctcacacagacgtttgggtggcagtgctgagagcggtgctttcaaggagccgaatgctactatctaaaaaagtgagagatttaccccatctcttcatggcctcctgcagttgatctactgatgaggaattttgattatgttatttgtttcaataataaccaaagcaaaaaaaaaaagtatcaataaaactaccagtatcccaaaccagagtaccttcttttgaacagtacaacttaattctgtaaatcagaatggcaaattgcaaatactctggttacttcctgtaatcgattgatcagagaatattaaattgttctagttggttccgttttcattgaaatatttcgtaataaaaatgtttagaacaaagatggaagtaacttataaaaataactcttgcttggttaataactcattctcattacaactcagtcttgcaaactgaggaggagccgggagtattaggggtgggcagggttctcaaagctgcatgtgggtgtcaagtggagtagcagacgggtggcaattggatggggtgtgaaagggcctgcccttcccagccttccctccgtggaggtcttgggtgggagaagggaggggacagaggtttcaccctgaagtctttaaggctaagccttaggcccgagtgtttcagccccatagtgcacaccgggtatgttgaatttggtttaggtagctgtcatgatattctttgtcaggacagtgttgtaaagacagttatgttaatgtaattgtaatttgctggtttgaggtgccagagtttagattttattcactgaggaaaaatgagaaaactcagtctttagtgagattgttgcagatgacacagttgtcccaagatcacggaaaagcactagttatgtacagcttaggatagtcataacgtcatagtcaggttgtgattacagctgaaagaagaaaaaggtgatttgacacccacattagcatgttggtaaattgttgagagatcttttcagatcggtgtaaggtaaagaagctcatttctaaaggttatcttttggcctggcaaattcacattttcttcagtgtatcttggtctattgtgctttcatgcagaatttactctccttttgctctaagatttggcccaagtgtagattcccattccaggacagaaaagcactttctcaccatgggccttgatcccttggcctagggggcgtgtgcttgctgcatgttttaggatgagtactcccaggtgaatgtgtgtctgtgggtgctgtctggagcattggttcccatctgtggggaaagggggaaaatgtccactagcccttaatcgcgctgttgggacgggttggatttggcgagtccaggcccatgctgggtggcggcatgcagacggccacccctgaggttgcaggagctgtgagttctggtggccagtggtggcagccagtgctctggcacaagggacattcctaaaagtttagattttgtgacttgagggccctgttgccgtttgacctgggaggaatatgttgttcctcggagccttggcttacccagctgtaaagtggggttgcccttttggtgaagaatgtgaattctgtcaggttgggccagataacatagctgtcaggtggcgctcactattccaaactctcccagttcccctcatttttcactgattttcacacattaatccagactggatgttttctcagtgactgaggtgtttggtgtggcagctgactggttctgtcaatggggaagttaccgaggtctgaggtgggtcaccctggggcggtggttgccaacataggggagggttgcagtggcctttggaggcctggacctgggtggagggctcactttaggctagaggccttaatctggtgtttcttttgacatactcaggtaggagtgacatttgaaaagaacaaagaaaaagaacttttggggagctgtgtaaagacagccctggacagctctgcctagcatagggcaagggcgccgctctgggtcttcccttcctccctgccccctgccccgcggctggggtcgtcaccatcgccttcgggatgaacagagtcatcttggtgacaggttgggatggacctcacctgcctttggtgtctcagagctggtgaccctcatggcttagtggcagccaggagtcggggtcctgtgacgctcttaggagcctctctcctcactgcttactgtgcccgagcactgcattcacagcagaggtctatgagtttgaacagaggatgacgtttgaagttcgttacggttgccctggttcttagggcctgtgagaagctttgtaggagagggtgtcccgcttgcttctgtggcaaatggacctgaggcaggccccgggcgcctgggaagttggccttctcccagggcagagagcagagccaccctggcttccaggactgcccccgggctccccggtgtgctgtggaagttgccccttagacatcagcacagggaggccgggaggcggcgtctggtcagagcagcacagaccgggctcagcagaacagactggtgggcgtgtccgcatcccgaaatcagagtggaatggagacagttcctgttctacctccaaagccttttctactgtataatgtgagttttcttccacttaagggataaatttgaagaaagcttttataaattgttggttgtaagtgagttgatcaaagcataattagcagctgtgtttgaggatcttgaagcagaggtgtaacagggctctggagaagcttgcctgagatttggggtaatttgcagggttcccgaagtgctttgcttttcttcttcatggtgctcagtaggaacctccaagccctcgatcatccaggaaacagttgctgtttagggtgttcacctgtggtgcccggctcaggcagcgtgatgggggcgtttacttaatcaggcctttgatagcaataaagcagttaaataaagggggcttttggctgcaggcccttctgtgccgagtgctgtgcacctgggcttcctggacgcttctgcttccaggtgggcctgcggttgctatggcattgtggtgtcagctgcaaacacgtacacagctgttctttccaattcttgcgtggaataatgaagtagaataagtgctgtcaagttatgttcgaaaatggggtgcttaatatttccatggttggaccatgaaagttttgagtgaaaacttttgatttttacatatctcaaatgaacatttgcaccaaagatgtacagctttcgaaaaacaaagagatacatgttgtccaccatgaggcccctctcccatttgagaaagtacctggtgtccgctgttggtcagtccgcggtggtcccaggctcttctccaggcctgccttctgcctggagcaggccatgctgcagtgtgcaggatgatgtagtgaagtgcccccagcttctcccaccgtgggtgtcatgttgtggagcagaagttgtcgttgggaaccgcgtgtgagggcaggagaaattgtttgttgggagccgcatgtggggacaggagaagttgtctgttggggactgtgtttggggactggagaggttggccccccgagccccattgtctgtggcctggtgtgtagacctgtgtccgtccttcctgaggtcttgctgaggttggcccccgagccccattgtctgtggcctggtgtgtagacctgtgtccgtccttcctgaggtcttgctgaggttggcccccgagccccattgtctgtggcctggtgtgtagacctgtgtccgtccttcctgaggtcttgctgaggttggcccccgagccccattgtctgtggcctggtgtgtaggcctgtgtccgtccttcctgaggtcttgctgaggttggccccccgagccccattgtctgtggcctggtgtgtaggcctgtgtccgtccttcctgaggtcttgctgaggttggccccccgagccccattgtctgtggcctggtgtgtagacctgtgtccgtccttcctgaggtcttgctgaggttggcccccgagccccattgtctgtggcctggtgtgtagacctgtgtccgtccttcctgaggtcttgctgaggttggcccccgagccccattgtctgtggcctggtgtgtagacctgtgtccgtccttcctgaggtcttgctgaggttggccccccgagccccattgtctgtggcctggtgtgtagacctgtgtccgtccttcctgaggtcttgctgaggttggccccccgagccccattgtctgtggcctggtgtgtagacctgtgtccgtccttcctgaggtcttgctgaggttggcccccgagccccattgtctgtggcctggtgtgtaggcctgtgtccgtccttcctgaggtcttgctgaggttggccccccgagccccattgtctgtggcctggtgtgtagacctgtgtccgtccttcctgaggtcttgctgaggttggcccccgagccccattgtctgtggcctggtgtgtagacctgtgtccgtccttcctgaggtcttgctgaggttggcccccgagccccattgtctgtggcctggtgtgtaggcctgtgtccgtccttcctgaggtcttgctgaggttggccccccgagccccattgtctgtggcctggtgtgtagacctgtgtccgtccttcctgaggtcttgctgaggttggcccccgagccccattgtctgtggcctggtgtgtagacctgtgtccgtccttcctgaggtcttgctgaggttggccccccgagccccattgtctgtggcctggtgtgtaggcctgtgtccgtccttcctgaggtcttgctgaggttggccccccgagccccattgtctgtggcctggtgtgtaggcctgtgtccgtccttcctgaggtcttgctgaggttggccccccgagccccattgtctgtggcctggtgtgtaggcctgtgtccgtccttcctgaggtcttgctgggccctttgtgtcccccactgggcatcactggaaagcgccgatgtgaggaaggcacacgtggcatcttgatctcaaagttgtgagaggagcgtagccaggtagggtggtgttggggtacatggatcttggagggaccatttccgaatagtcaggaaaccccagaaacagttttttctgtctatcaaatttgacattaggttttagaatgagggccctgcagtaagaaggtctgtggctcccaagggaattgtttcggggttggggtcagaggtctgagtggacagtgcgtggacaaggcaggacactaggagccagggagctgaacccttctctgggcgctgggtgtggcccaagcacacctggggcagaggctttgtgggtcagctggtccactgggggctgcagacactgtgggcagaggtgctgccggtggcaaggtgggcaccttgttccatggggtcgggggacacagcctttcattttctgactttgcagtaaagtgtgtgggacaatgacctgtgaaagtttttaaaggaagttctgtgtcttctgcggaggagcgtggtctccgtggtgttcataggagccacgcacggtgctcagagcatgcccagaacgcacaggcctgccttgctttggagctttgcagaaggttacgaatgtcagtgtcagaagcatcatgacaggaacaagggtgacacgggaagcaggctcgattggcttttttatgtaactgtaagtgtaaaaaattattagttacttcaacatgatttttttgatgataaaattagtttttttttcattataggaagtttgggaagtaaactgtaaagaagaaaatacagtcacttgtaacgtcacctggcccagactgctaaaatttcggggtgtctcacttcagcctgtgtctgctgcatatctgcttctgtgtttttctgtaattacagttctcctgtgacccaagtctgtgctttgccttgtcctgtgtctggtgcactttcccttggccctcggtggtctcaggctccagcatttggtaacggcccctgtgccagggtgctgtgctgatggcgacaagtggccccctgtaggtgaatgccttcatgtctaactgtgtgtgtgtctggtgggttgagcattttcaaggctttgatacatatcaccttccaccagattacacttttaaaaccattgccagaatacgacttttgggaatggataccattctaaaggaagaaaatcgtgtctagttttaagttgcatttctttgagtgaaattagacctcgttcatgtggatgttggctatttattctcgccaactgtgcctatttgtataagcgcgttcttgtttttttcttttttttcgagacagagtctcactccatcacccaggctggagtgcagtggcgcaatctcagcttactgcaacctccgcctcccgggatcaggtgattctcatgcctcagcctcccgagcagctgggaatacaggcatgtaccaccacacccagctaattgttgtatttttagtagtgacggggtttcaccttgttggccaggttggtctcgaactcctgacctcaagtgctccgcctgcctctgcctcccagagtgctgggattacaggtgtgagccactgcgcctggcctgcatgagcacattccgagggtgtgtactgggccacgggggaaggctgatgagggtaccagggttcagctgtggggggtcccaggctgacagcccctgctttcatggtgtgtccgttgtgggggccaggcagttaacaggcaaacagatcagcaggaatgtctgattgtgattagcacccttgggtgagaggggactgctgggcagggtagtcagggaaggctttcccaggaggctgagggatgagaaaggggtcagccacatgcagctgggacctgtatccaggccaaggaaagagtagatgcaggggtcccccgtgtagattgtagggctgccctctgatagtgtgaattgatattgtagggctgcctgtacacagtgtgaattgattgtatcacagggctgcccccaagtagtgtgaattggttatattgcagggctgcctccaggcagtgtgaattgattttattgcagggctgcccccaggcagtgtgagttgattgtattgcagggctgcctgcacacagtgtgaattgattatatcacaggactgcacagtgtgaattgattgtcttgcaggactgcccgcaggcagtgtgaatcgatcgtattgcaggactgcccgcaggcagcatgaatcgatcgtcttgcaggaccgcccgcaggcagcgtgaatcgatcgtcttgcaggactgcccgcaggcagcgtgaatctattgtcttgcaggactgcccgcaggcagcgtgagtctattgtcttgcaggactgcccgcaggcagcgtgaatcgattgtattgcaggactgcccgcaggcagtgtgaattgattccaagtgcctcagtggctggaagccattgagggtttgaagctggatagggcataatttaaagttgtatgttgaggtcacttttgcgtctgagctgtggaatgtgggggtggttgtggcaggggcctggggcagatggtggggcttagggaggtgtggatgggctggagggaggggtgaagacaaaggctcttgtggaatgagattgaggtgggcaggcggggtgagagggaatgtcggtggctggtgggaggcaggagctcaggggagcagctggcacaggccagggtctgggagtcgtggtgttgctggctctgatggccatgacggtgttatgagcctgtagagtagactagaagagccgtaggaggctgccctgcaggtgccggcacctccaaggctgggccagcttgggagccagagaggagtgccgggagaggccagcattcatagggtgcatctggccagcagtgctgggagtggggtggtgagggtggacacctgggtgcaggagcctggtggaggaggttgcaggaagggtggcccagagcaaagagctgtcagctcttggggtggaaggacatggcgtggccgttgctgagagccttatgtggtggagtagcatttgttgcaaggttggcgtctctcctggcctccagcgcagcgatggcagaggtagcatggctgtgatggaggccgctttgctcttgtgtgtgcagtcctcgccttcctgccgcatgttggcgtgcacaaattcacagatctgtagatctctagagccagaaagtcctggaagagagtccccttccacagagacgctgaggctcacagaggtgaccagcttctccaaaaccccgtggccccttaatggaggctgcatgccacagggcacctgtcactccttcaggccgcctccttcatgcttgtgctgctgagagagactggaaatggttcagcttggagcaaacttacaacttaaaaccactaaagcacaggggctttcaaagagaaaatccacagaagggaatatcctgagtgcatggtgaggggctgttgcactggggtgggtctgtgtggcgcgtggcctcacccgacgatcctactgggtcctgtgggccctccagtgcttgggctccccccagctggtggctgtctgctaggtctgggccacctcatctgcctggggaggctcatctccgtcagtccctgcagtcctgcggctgcaagggcttcaagtggccaagaggcactcctggtcttaaggcccttgctcagaagtgatgcaggcctctccctagtttcagccgagaagacttggtcattgtctgtgtctgtctgcacagagtgctgggtggttcggcttgtgcctgggggcagggtgggatacgggtggacagccagcaggcctcagaccgtgcttggccttggtgggccagggggatgagtttggttggttggtcaacaaacgttcactcggcagtagctcaggtgagaccttgtggatctggcagcttgctggcggagttgcttggggagtgctgcaggtcggcgtggacgggcggaggtgaggtgcacggatgccgcttctcagcataaacgtcgctcgtggctcccttctccagagtaccttctcaaggtgggcatcttctctgttcagatgtgggtgccccagtgtttccctgccgctcctgcctgaccgggcacttaatggagctgcttagtgacggatccagagcggcagagagctgggccgggagctcgtcacagggcagtgcgagggcggtcctggtcctccggctcccgcggcctcatgggctcctggtttcaggatggtgcttgcactcagggccgccgtggctctcccttcgccccaccatcgattagacgcagagctctgagagttgggaaagcacggactgggcgtcttggaggctgtgattctggacaggtgatagggccaccctcttccactttcgggtgctctgtgggccagacgcagctctgcctgggcccgaaggctgggcttggggatggcatctcctcagtgccttggaggttgtgggcgtgccaccagagttcctgtgtgggaagggctgccacctgccttgggtcacatggttccagccctggagacctggtgttgtggggggtggcggaagggacctgatgtcatggggtatggtgtgaaggaaatggcgttttgtggggtggtgtgagggacctgatggtacgagtggcagcgtgagggacctggggtgtgggggatggcctgagggacctgggatatgggggatggcgcgagggatctggtactgtgggggtggggtggtgtgagggacctggtgttgtgggggtggcttgagggacccggggtgtggggtgtggggggcggtgtgagggacctggggtgtggggggtggcgcgaggcacctggagcgtgagcctgcagttcacataggggtgcaatgtggggacggtggtgttcaagccatgggacacttgcccatctgttgtgggggaggtgacaagatcccagcccagacacctgggcggggacattctagtgatgcaggggaggcagtgacccacagggcacacacgggctggggctggggtgtggagctggtgcggggcagggcaccctggggtttgtcgatctcagctgactggaggcggctggttccagatggcagtgctgggggtcaggttcaggaggagatggagaagtaggtcactgactgtggtgagggggtcaaaggacagtttctttgttttttcctgtttgtattttaaggagagatcttggagccatgctcaatagcggaaacaaagtgcgccccatttggattcgtgcttcgggtcggtgggagttaggctggatgaggatgggtggggcgggagggggaggttgagcctttgacatgcttcatgtcagccacttcatccaggccactgtcatttagcctgcaccccgctactgcaccccacttggagctggttggcctgggcacgtctgcggtgctcggtggccatgctgtgctgcggggatgcagggagtccacggtgcaggacgcagaaggggaaggtggccttcctgtcatctctcttccttgtggttgtggaggtgacatggccctgcaggggtttggtcgtgtgtctgcaggccctagagcctggtgggaggcggcaaccttggtttgtccaggaaggggtggcagatatccagaatggagcatgtcctgtgggtgcaggttcctcacgggtggatctgtttgtcatcactgcatccctgctacccgggacgcccctgaggtattgatggcctggccagtgatggctgcaggaggcttggcaggggcagcgttgagggccacaggccacctgccatgaggttctgaagtggtgccatggcaggggccaggcccctcagaggagggactgtggggactgagggactgtcttgatggctgtgggggtcaccgagcggatggggagggagggtggcctctgtggatcagggctcttggtggtgggaaaacaggtctgggacaggcccagccctgtgtcctatggcggtgagaggggtgggagtgaacggtggatgggactcatgctgcagggccgagatgacgaagttccctctgcacgtgcagcctggggagggcagtcccagggccctgtggggagggagcattgctgggtggctccctgcctgacaggagtatcgtgtgagaggaggcctgagagtagccaggccgggcggtgacgccctgtgattgcttcaggcacagtgggcccagaacccccggtgtcccacgtcaagagctgagcaccctgggtgtctggccagtgggcaggaaggggcctctgtgactggctggggcgcaggccggggcctcgctggaaccctcccaaggctgccggtcccacaggggacttggtcccttcttgctcctcagccccagcgcctgcggggctgccctgcaccctgccttccacttgacactgggggccatgggctgaggttcattttggacgtgatttccatggtgatttcctccctttctgaacctccttgtaacttttcgagagtgtgctgttgacttcagatgcttcccctgtgaggggtgaaaatgttttcttcccagctctgagctgctctgtgggaggggccctgcctggggtctccactgattccccagtgcccagggcagcgtgggtagtggcagaaaggggccttgctgggtgggtgcaggaggaagcagcgctgggcatgccttgttctggggggccaggtgtgggggttctgatctcttggggccaatgtgtgtgtgtttcctcggcagaggtcctttctgccgtgacttcttccttctgcctggagcctggcaggtggctctgggtgatgcctagatgcccgtcctatcagcagcaggggtgtgccctcccgggcgggcctctgctgttccggagccctgtggctctcatggagcctgcactgggtttattgaactctcttgtccttctcttctctttttattggggctttgaccatttaaattcctttactcttgttttggtgggtcttgctggggaggggtgggggagagaggagactgtgctgccagcaccccgggctgctctcagcgggtgggggcacctgtctggaatctccatgtacaagcacaagcaggcattgtggcgttttgggaagagtcgtcagaagttgcctcctatggggcagaggtgccaggaggagactcttgctgtgcccaggtccagactggcaggagaagggagcggtgagtgatgggacatggagtggtccatggggagcagagccaggccgggaccctggaggggaggatgatgagaggccgaggataggtcatgtgggggaggagcccttccttctgctgctgtgccctggtcgctgctgtgcagaaccttctggtctgcagtgtcctctgggggctctgggtgttacctgttttgactgttgtggcctcatcttcatggaaggttgtagaaaaacagtttgtcaggtgtcctccgtgagtacttacaactccagcgtgtgacagtaggcgttgggtgaagatggggtgagcgggtgaggctgactccctgccttggggacaggctgctccgtggggctgctgtgtgctccgtgacaggttgggtttctgcagcaggtctgaagcagtcactttgctccaagcatcttgagtgccgtcgtctctggcaccgtgtttagtctttgtgacgatggtgtcgtgaaacctgcctagggacgagacactgaggctcgcatttctatgaactgctcaaggccacgtgactggtggggcctggggctagaaacccgggctctggaacctctgcccgggccctgcctccctctggagtgaccctggtggcagctgtggactgctggggagttgggagttgggctggggtgcacggtggatgaggggcagggtgcggggctggggcaggcagggatctgggccgtggtgcttctctgcaggtgtgagtatgggtgtgactcaggtagatgagacccaggacgatgtggagagcagggccttcctctgcaggcagtggggacccctgaaggctgtggagtggaagagccagaaggtctggcctgggttctagatgttggtcctgatgacacactggagacagaatcagaaagagggcggtggtcactgagcaggggacgcagaagtgggcctgtgtgttgtggctgctggatgctggctggtgccaggcactgtgtgcgcctcccatgctcaccactgccctgcagggcacatgtttgggatccacttcctggacaggtcacagacactcgcacagaagctcagcctgggaaccccgcttgcagggtctcggcacatcctgatggtggggatagtgggggcagatgtggaaggcgggcgtgggcactgctgcacctggagaaccagcagccatgatggggctggtgggtggtgccagtggaggcacagtgcagatgctgcagcttggagttgggggacggagcctggtgaccgaggtggtcatgcggggagaggactgggggaggggggatggagcccagtgaccgaggtgggcatgtggggagagggcccagggggggatggagcccggtgaccgaggtgggcatgcagggagagggccgcgggacgatggagcttggtgaccaacgtgggcatgcagggagagggctggggggaatggagcccggtgaccgaggtgggcatgtggggagagggctggggtgggggtgtacggagcttggggtgtacggagcttggtgactgaggtgggcatgcggggagagggctgcaggaggatggagcctggtgaccaaggtgggcatgtggggagaggaccagggggcatggagcccagggaccgaggtgggcacgccaggagagggccctggggggatggtgcctggtcacaaggtgggcatacagggagagggcctgtggggatggagcctggtgacggaggtgggcacgtggggagacgatcctgcttaacagaggtgtggccccacacgaggaccctggaagtgcagtgggtttgtgttgcatgagagtgggagcacctctgttaggggaagagcagggtccaccctggggacaggagggaggggctagctaggacctgctggccagctggagtcagggagattccagccaggccttgcaggtggccctgtctgtggttgtcctcactgctctgcactcgggatgcccagctgagcaaatcacttgacaactcccatcctttcctaggtgtgtccaggaggagctagtacagggctgggctgcctcttggtttttagaaaagcatttgtggtacaacagaactcccagaggcagccccctttctcatctgggacttgggcaggcacgcgccagcctgccctgtgtgggaaggtgctaggtatgtcgcagccacagggaattgactcggcattgagccccagggcttcagggattttcagaggtgactttgagacttgatttcttctacacacccttccccgtattgtgactctgggtgggggaccaggcatcttgatgagggggtggtccagtgagggtttgggtgctggggagctaggtctgggatggccctgatgtggggcggtcccggggcagggttgccggtgtcaggcagcgcccgtgtttgaacatctcggcgaggaatcccgggtgctggtgtttataaaaatagacctgcggcttccatggctgtgtcctttttggtatgattgacattggatagcgtgcgtttgtattctgccgtgttcctgtgatgggagccaggggcgactcttctcatggcgaagtctggttggtgctgaagcatgttgcatcacctgggcttgacggtgcgctctgcgctcacggcagaggcagaggctgcagcatcttccgccaccgtttccatctctttttatgctatttccagtgtgatggtgcctctagcgctgtcctgagtgtggcctgttgtgcatgtgatggggtcttcacttgcctgtggacttactcttctcagcgcccctttcttgtgcgggggtggggagggtctcgctgtagagggaagagggtagagcaggtgccctgagactgtgtgatctcttccttctaaaggagctcacgaatattcatcagctttaagagaagtccatgctctgagtgcctcgttaaccagaccttggtgtgactctctcagaaaaaaagaatgtttctagaaggtcagtgtttcaggggtgtcagtgcaggctggtggtgtgacctctcggggtaaggagggagcctggtcagctttgggattgcagtggtagctaccatagccccatgctagtaagagtgtgtcccgctcatagtgacactgaagttgtccttctgaaaagagagtaattgtcgaagaatagatgagtaaaatacagtgatggtctttatgactgtggctggagaaagatttcctaggatacaagtagcatgaactaatagggcagaaagtcgatacataggacttcaaaattaaaggaaaacttttgctggttgacagacgttgttaagacaatgaaaaggcaagccgtcgacttggagaaaatatttatatctaacaaagaactggtgtccagagtacgtaaagaactctcacgactaaataacaagacgacaaacaacggttaaaaatgggcagaaggtttgaatagacccaaaagaaggtacacaaatggctagcaggtgtacgaaaaggtgctcacatagttagactccaggacatgaaaccccagtgggatgctgcggctgataacacacccacctaaaaacagctggagttaaactgacagccatcccgtgtgtcggtgggtgtggaggtcctgggaccctcaacgctgacagttaggagaagcgtaaaaagttaagtactgattgaccgtgtgcggcagccccacccaggatatttggaaagaaccgaagtgtccatcctgccatgagtggtgacaggtgatgtgatagatccgtatggtgagatgctgctcagctccacgcaggagcggatcacgacacatgcagcaatacagtgaatctacaaaattccccagcaggtgcaagaagccgggagggaaagaccgcctatcgcacaatttcatttgtatgaaattctagaaaaagctaagctggaacagttgtggttgcctggattgagggtgacgtagtgtggcattaggacatgttttaagcgaatagaaacgttttaaatcttgattgtggtagtggttacacaactgtatacatttgcccaaacttttcaaattgcacacttaaaataggtggattttgttttatgtaaactgtatttcagtaaagccgtaccaagtccctggggccatgttccttcctgttgcctgtagcgtggtgtttcggggaaggaaaggcagttatggctgtggttgtcatttgtgtctcatttgttggcacagaatcccaatcccaatgtctgccgtctgctgcacgggggcaccgcagagcgagggctttcagcggcctggcgggaaacagcctagttaactgcctcttaaatctgatgctggctgtggaactttgcatttctttaggagagaatcagtatttggaagtgtttgcgtgagagaaggaaaatttgttcgttatagttgtgaaaaagaggttactgctattcctgcagaggacacaaatgaggagctgtgtgtttgggacctgtctgtaccccgagcgtcagttctgtcttcccttcgtccaagcaggagcgtctgctctggattagacgagaaagagttttcatgcccgcctgctctttcgccacagatctgttgcgctctcctcagcgttcaccctttccaggagcaggtgtgtggcaatagcttatgtagccttacactcacaaacaaggcagttttctggcttttaaatagttattttctttctgagtagtacgtactcatcctagaaaatttgataaaggcaaaaaagtatggaaaagaaacgcatgctagtctgtattcctgtcaccaagggagaactgtagaaccgagaccacgggtgtgtggctcaggcagcatcgctggttcatcccacagcactcacggagtgcttgcacgtgcagggattctgcgcctgttctctgaagcttaaacccaaacaggcgcgctgttgaaagtttcaccgccatcgtctccaccaagcacctgaagcgagtcaagggtagagaggagcgggcaggcacggcaggcagggctttcccaggaagggcagggaagaacattccagaccttgtgtggccggtggggagggtgcatgggccaggaggtgcgggacggttgtccctgtgacagtcctgagcggggagcatcccgatgggattccgtttgagcggcatggctttgcgagttctcttcctgcagtgtggctagactgtctctccctacctgaggttatttacctactcacctgtgttttcatgtcggcgttgtgagttttcttttccttgtagtcactaatctgtccaggattaattttcatgtgtcactcaaggtggcctcttttctccccctgggctgagtggcttgtccattgccatgtcggactgctccctgtgcccatgggtctcctcctggccttcgctccatcctgtttggtgcctctggtgcaagacatcagcctcatcctgtatttcctgtcccaggcctgtctcttcccggaggagccttggaatggcatttagaggaaaatgactctcgagcagtttcggcagcgctgggggtgctggtcatgctggtcacatttttaacacagcacattctccccctcctgtaaattctgtgaaattgtatttttatctcttctcttgcacagaaaagcttagatcctagtaacataaacatatttacttacttggcttctgctaccctatacttaaacacagattcagaattacaacaataacatgagagtaaagtttaaggtttctttgcactctttgtctttagaatttattctttaaggatgttagatcagtactgtgttcaaaactccactgaaatgatccttttttgtgttggttatgttaccaatttgatacacaatttagttatgttttggtttgttttcaattttactttttttgtttcattttgtattttgagggtataaaacatttatgtggttcaaaatacacatactcgcatgcatacacacatatattctttttctcctattataactaatgtagcatatacgctaatttttaccttgacattttttcttaatataatctggagatcatctctggtagcattttattttaattgaaaaacttgaagttttatgtgtagtacactcaggaaattactctgaatagtgatgcttttctgcataattcaagcactaaaacttaaaaaaaataattttggaaggaaatagtttaaaaaatacatatatttttctctgccaaggcaaaaagcatataataagcacaagttagctctgcctgggaatattgggctggagacaggggaggctcagtcttaagggaaggccaggcagggtggtctttgcattggtgggaggctgaagcctgggttagctaacgggccctgcctctgtgtcttcccgtccagcctgcagtgggcttagaaatacttcctggaattatgtgtaaaccaggtacagtcgcgcgccacttagtgatggggatacattctagaaacgcatcattaggcaatgtcatcgttgtgcgagcatcgtggaatatactaacacaaacctggatggcacagcctgctacactcttaggctgtgtggtgcggcccctggctcctgggctgtaaacctgcatggcttgtgacgtgtacagttgtaacacgatagtgagtttgtgtatctaaacatagaaaaggtacagtaaaactaggggataaaagatgaaaaatggtgcatctgtgtagggcactcaccatgaatggcgcttgcaggactgggtgttgctctgcgggagtctgagaggcctgggacatgactgtgctgctgtaggctctggggcactctatgcttagggtatgcttagggactatggaatttataaaaacacagttttctttcttcagtaataaccttgacttactataactttataaacttaactttttcaaactttttgactcttttgtagtaacacttagcttaaaacacaaacacattatacagctgtgcaaaaaaatactttctttgtatccttattctgtaagctctgtcacccaggctggagtgcagtgacgcaatcatggcttactgcagccttgacctcctgggctcaggagatcctcccacctcaggctcccggatagctggaactacaggcaggcgtggccaccatgccgggctaatttttgtatttttttgtaggtttcaccgtgttgcccagactggtcttggactcctgggctctagcgatctgcctgtcttagcctccagaaatgctgggtttacagacgtgtgccaccacgcccagcgagcttttttccatttttaaaattatttattactttttaaacttacttgttagaaacaagacacaagcacacgttagcctaggcctacagagtcaggatcatccacatcactgccctccacctccaagtcccgtctccctgcagtcttcaggggcagtaacacacatggagccgtcatccctatgatatcagtaccttcttctggactcttcctgaaggacctgcctgaggctgctttacagttaactgtaagttttaataagtagatgcagtatatttctgaaacagtgatgggaagtagaatgtagtgaatatgtaaaccagtaacattgttgctaattatcattgaaacaggagagttccctgacccgctctgggtacttgcaacaggggctgtggctcatttgctggaaggggagcgtgcaggggagcgtgcagacgggcaggtgcaggagcccgggtgagcccttttgggctcccgccccacagtagcacctaggggtagattacaatgaatgctcttttagcagttgccattctcagatggctaagtgttaaccagctcagcagagagtcaggcgacagcctttttccccctgccctctcggtacccgagtccttgtgcggtgtccaggaagaatcaggtcacacggacttgaaggatggcatttgtggggattttattgagtgatggaggtggccttcagtgagatggatgagctggcaaggggatggagtgagaagatgatcttcctctggagttcagccgtcccgcagccgatctcctcctggacggtgcccagccaaacccctctcgacattcagacgctccttctcttttctccttctctgctgcgccactttgctctcgtcagtggagcttggggtttatatgggcaccagataggggcgtggcaggccagattagtcttggaaaaggcaacatttgggcgcggaaacaggaatgcctgttcccatttagggctgcaggtgtccaggcttgagggtggggcctttgctgggaaattgccctcttctacccagtatttccttgcctcctgtctgtatcattagccagtattctgtatgctacagaattgtatgtgggagggttttttttttttaggagatagggcctcactctgtcactcaggctggagtgcagtggtgccttgaactcctgggctcatgtgatcctcctgccttggcctcccctaagtagctgcaactacagccactgtgcctggctgatgtttcaattttttttttttttagagagaagggctcttgctttgttgcccaggctggtcttaaactcctggcctgaggcagtcttcccatctcacccgctcaaagtggtgagctactgcacctggtcagtgtgccatacttttcttttttcttttttttttgagatggattctcgctctgttgcccaggctggagtgcagtggcgcaatttcggctcactgcaacctctgcctcccgggttcaagcaattctcctgtctcagcctcccaagtagctgggactgcaggcgtatgctaccacgcctggctgattttttgtatttttagtagagatggggtttcaccctgttagccaggatggtcttgatgggaccagcgtcatgtatgccgtctgttattgccaggagcatcatgatgtgaggcgtggctgtacgtggaggctgacagtttgagggtaggggctctcctttaaatagaggttaacatgcataaaaattcttggaggggacataatttatatacaataaaatgtcccccttgtaagtgcacagattgaggatgtctacccccatttcgttcagccccccagagggtctgcttgtgccctctgctgtcggcccacagccctggacgggaaggtgttctctgggccgcctctcgccgtcggtgtggatctgtcctttggagcgctcaggtcgctgaaaccccagttgtgtgctccctggtgtccggcttcctactcagagtacttggaggggcatcgtgtgcaacacgtgtccacagtttgttatttttatggggaatggtttctgtttggatgtacgctatacatttgccagctgaggagtctggcatgtttccagtttttggctattacgaataaagcttctttttgaacatttgtgttcaagcctttgtgcgaacatacgtgtagacgtccttttcttttgggtaaatgttaggagtggaatcgctgagtcgtacggaaggtgtgagtttggtcttgtcagaaactgccaggctgtgttcctgagcggctctgcgaatttagtttcatccgcgggctcagtgctgctgccgtgagatcttgctggctcttggcgtggccaggcttttctgttttgcctattctagtgggcatgcagtgttagcacatactactttttaaatctccgtttatggaggcgtagttggcgcgtggcagagcgcacctttctcagcctgtaggtctgtgagttttaacgatagtcacgtcaccaccaccgtcgagtacaggatcggaatcattctgtagcctcgtgcccctgggggtgagcccctgctccagcttcctccccggcagccactgagctgctgctgtcactgtgattttgcctcttctagaattttgtataaatgagattatgtagtgggagcctcacatctggccctttcccttggcgggatacttctgcgtggtgcccaagtggtgtgtcgtgtgcgtgccagtagctggttcctttgcgttgctgagcagcatcctggtgtgcggctggaccgcaggtgatctggttaccagttgatgggtatttgggttgtttctagcttttgattattatgagcaatgcttctatgaatgtttcctataaatctttatatgaacataagtttttctttgtcttgggtagataactaggggtgggattgctgaatatggcaaatgaatattaatttctgaaggaactccaaagtggctgtcctgttttgcattgtgtctcaccagcagcgcataaaggttgacatccttgcggaaagctggtatggtcagtcttgaattttagccttttcgatgggtgccgtgccattatgttgtggctttgatttgcatttccctagtgactaatgctgagcgtctttccaccagcttatttgctcatttgcctatcttctttcgggaggtgtcttttcaaatcttttgtctgtgtgttttaaattgggttgttagttttgtcattattgatttagtaagagtttaaaatgtattttctagatgtaagtaatttatcagatagaattgttctgtaactattttcttggtctgtgtttgccttttcttttagctgcatgcgttttaaagtgcaagttttcaattttaaggaagcccaatgtatcattttaagaattcattttgtgccttcttaaataaatccagtgtatcattttaagaattcgtcctgtgccttcttaaataaatccagtgagtcattttaagaattcatcttgtgccttcttaaataaatttttgcctaacccaaggtacaggagttttctagaatgcttatggctttagctcttactcaacccaattcaagttaattttgggagagttgtaaggtagggggttgagactcattttttctgtggttaccaatcatgccagccttatgtgttgaggagaccttcctttctctattgaacgatgctgctgcctttattgaaactcagtcggccacgtgtgaggacgtcacttctgggatgtgttctgtccactcatgtccttgtcttcccttctgcagctcagcactttccagcccatttagagggagtgttgatgggtggcaggagtcctccagtgctgctttttcgaaaacgttgagggctgttctggtcgtttgcattcatgtgtttcagaatcagttcgtcaacttctacaaaaaaagcctcttgataccttgatagctttttgtttgttttgagacggaatttttcactctttcacatcttttcctggagtgcagtggcacgatcttggctcactgcaagctccgactcccgggttcaagtgagtctcctgcctcagcctcccgagtagctgggattacaggcacgtgccaccacacccggctaatttttgtatttttagtagagatagggttttgccgtgttggccaggctggtcttgaattcctgacctcaggtgatccgcctgcctcagcctctcaaagtgctgggattacaggtgtgagccactgggcctggccaataccttgatatcttgcttgggattgtattgagtctatagatcggttttatgatcattgatatcttagcaatatcgagtgttctgattcacgaacgtgttgtacctcttcattgatttaggcctttcaggatttttctcagggttgtttcaagttctcagtgtttgtatcctgaacatactttgttaaatttattcttaagtattcatattttatgccatgtacgtggtcctttaaaaaattttgtttccaattgttgccagtatttagaaaaacaattgcttttggccgggcgcggtgggtcagtggctcggtggctcagtggctcatacctgtaatcctagcactttgggaggctgaggcgggcggatcatgaggtcaggagattgagaccatcctggctaacactgtgaaaccctgtctctactaaaaatacaaaaaattagctgggcatggtggcacacgcctgtagtcccagcactttgggaggccgaagctggtggatcacgaggtcaggagatcgacaccatcctggctaacactgtgaaaccctgtctctagtaaaaatacaaaaaattagccgggcgtagtggtgggctcctgtagtcccagccacctggaggctgaggcaggagaatggcatgaacctgggaggcggagcttgctgtgagccgagatcgcgccactgcactccagcctgggcgacagagtgagactccgtctcaaaaaaccaaaaaaaaaacaacaaaaaaattgcttttaaaaatagtgactttatagctcttccccaagcggcctgagatgatctgtgaaaatggttcattagtcacttgacccagaaatccccacaaaatcgtgcaaatccagaggttcaggtcttcttgatcactttaagaacgctcgtgaaactgcccaggccatcaagggtatgcatacgtgagaagtcaccaagtgtctgaaagacgtccctttatagaaacagtgtatgccattccgacttggcaggggtggagctggcaggtgtacctaggccaaacagtggggctggacacagggttggtgacccgaaaagagcgctgaatttttgctgcacacaattaaaaatgtggagagtcacactgaatgtgagggtgtagatgtaggctctctggtgtttgagcacccaggatgcgctgtgggacttccagggctggtggtcgggttcatccatacagggcgccccgtcacattgagacgatcctcacggtaaagacacttgttcccaagccaggtgaggaagttgcacagaggaaaactgtaccagaagaaactgaagaaacaaaaacttgtggcatgggaataaactcagcatacaataaatgcaattaaaataaaaaaaattgactttatatcctgtggatttcttaggattttcttcaaagataggcgtgatctgcagtaaagagtggttcatgtctttttttctggtctgtgcaccttttatttcttgttcttgtctcattgcactggccacaacctccagtgtaatatgacaaacagaagcgttgagaagggacattttgccttgtttctgatcttgggggaggcagtctgtcttctctcatgacgcacatgatgtcagctgcaggtttttcatagaggccctgtgttaggttgaggaatccccttctgtcataggccattctggctgctgtaacaaaataccatagactgggaggcttctagacaccggaaattcatttctcacagtcctgggaagtgcaagattgccatgctggtgagggcctgctgcctgctcccatgcagcttcttgtgtgtcctcagagtgtggaaggaaggggcaaggcagctgtgggacaggctctttcataagggcgctaatccggttaatgagggctgggcccccaaagtccccccgcttctgctaccatcaccttggggattgggtttcagcatatgaattgtgatggcattcagtctatgcaccttcttttcctagtttggtgagaatttttgtcgtgagtggatgtttatttttgttaaaatgcttttcttcctgtattgggatgcttgtatggtttttcttttttagtctgttaacatggtgaattacactgatttaattttgagtgttaaaccctggcgagttcctagcataacccctgttggtcacatgtattatcctttttatatacagttgcatgcagtttgctacagtttggtgtgtaggttcaggagggatactggcctgtcatttccttgcagtttgtcttgcagtactgcatgagtaatgttagttgcaacagttcacttgcctcccagcagtttctgttattttatatccttgatagcactgggtgttgtcagacttttcaattcctcgaatctgggggtgtaaaatgctctgatagtgttgtcttaattttcacttaaaaattaattaatgagccaggcgcggtggctcacgcctgtcatcccagcacttcgggaggccgaggcgggtggatcacctgaggtcaggagttcgagaccagcctggccaacatggtgaaactccatctctactaaaaatacaaaaaattagccggttgtgatggcgggtacctgtaatcccagctactcaggaggctgaggcaggagaatcgcttgaacccgtgagcgggaggttgcagtgagctgagattgcgccactgcactcgaggcagggcaacaagagcaaaactcttttttttttttaaaaaaaaaaagaaatttgattaatttcctttaattccttaatgaaaattaatttcatttaacttcttttcctttaatatagaggaaattaattttctatgtttattgtttgtgggtaaccttctgtgaaatgtctgtttgtgtctttttgccccgttttctttaaattatttcgtattaattataggagttctgtgcatattctggttactgttcctttgtaggtcatctgtatatggccagtatcttcttccagtttatatctgatcttttcactttctttatggtgtcttctgacgaataggactccttgattttactgtagttgaatgtatctattgtctcctttttggtaagctttttcaagtcatctttaagaagtcctttctaacccgaaggtaataggaatagtcttctgtattttcttctaaaatgatagcttttgcttttgcttttaagtatgtaatcctcctggcatggggtttgtgtgtggtgtgagttagagctccattttcatttgcctcctatttggattgacagttgtcctggtgttatttatttgaatggtccttcctcacctctgtggtctccatggcccgtctgtaacatttcaggttttatattatgtggcatccgtttctagcctgtcggttgttttctcttggtttatctgtctgtcctttcatcagtagcatcctgtccttaaataatttagctccatactaattcttgatatctactagaggtaatactccattctgttgcttttgagaattgtctgtgcaactcttggcactttgatcttccttataaattttagaatcaactcttcggggcccataaaagtccttgtaggttattttaattgaagttgtatcaatctgtgggtcaattttgggagaactgaaatctatgggccgggtgcggtggctcacgcctgtaatcctagcactttgggaggcccaggcaggcggatcatgaggtcaggggatcgagaccatcctggctaacatggtgaaaccccgtctctactaaaaatacaaaaaattagctgggcatggtggtgggtgcctgtagtcccagctactcgggaggctgaggcaggagaatggcgtgaacccgggaggcggagcttgcagtgagccgagattgcgccactgtactccagcctgggtgacagagcgagactccatctcaaaaaaaaaaagaaatctatgagatagtgactatatccatgaatatggtatattactctatttacatattttgtaatatttttcaatcaagttttatgtgtctttttcatataggtcttacacatattttgttagatatgtgtagggcattccaggacattctgagttcattgctgctattttaagtattttttttaaacacattttctggctgggaatgatggctcatgcctgtcatctcagcactttgggaggctgagatgggaggattgctggaggtcaggagcttgagaccagcctgagcaacatagtgagaacccctgtctctacaaaaaattaaaaaaaaatttagccaggtgtggtggtgcatgcctgtagtcccagctactcaggaggttggggtgggaggatcgcttgagcccaggagtttgaggctacagtgagctatgattgtgccactgcacactagcctgggtgacagaatgagacccttgtctaaaaataaacaaaaaattgcgttttctaattcttctttgatagtgtgttgaatcgcagttgaattttggatattgatcttactctagcactcttcaactcttccattaaaaatttgcaattttttgagggtcgcacctagagaatttattacatgcaattaatgacaattgtatttcactgacgtcctgtgcttcattcccttgttgtcttctggtattgggcttgttggggtctcaggtgtagtgttgaggggaagttaaggaagttctttcccactcattttcttttttttttttttggagacagagtcttgctctgtcgcccaggctggagtgcagtggcgcggtcttggctcactgcaagctctgcctcacgggttcacgccattctcctgcctcagcctcccaagtagtagggactacaggcgcctgccaccatgcccagctaattttttgtatttttagtagagaaggggtttcaccgtgttagccaggatggtctcgatctcctgacctcgtgatccacccgccttagccttccaaagtgctgagatgacaggcgtgagccacctcacctggccctttttcttttttttttttttttgagacggagtctcactcttgttgcccaggctggagtgcaatagcacaatctcatctcactgcaacctctgcctcccgggttcaagcaattcttgtgcttcagcctcccgagtagctgggattataggcatgcgccactatgcctggctaatttttgtatttttagtagagacggggtttcgccatgttagccaggctgatcttgaaccccttacctcaagtgacctgcctgacttggtctcccaaagtgctgggattactggcgtgagctaccctgcccagctcccacttcttattttctgaagttgctttctgtttgcttttcttggggcaggggatatttgttagtttgtctcaatggatgttggatcgtatcaaatgccttcctattatttaaaacccaccagggcccttgttagctcctttgtcctgccacctccctcttctgccttggtctctgattcctgccacacacgcatcttggcaggtggctccccttgttgcttcatggagagcaccagagccatccgctgggggctgaggccaccctgcctgaccccgccctgctgagagctgagggatctcatctgtggcctcactcttctcctgtgggtggccctctgccctgctcttcctaggtcactccctcaccgtatccttgctgctttctttgccctcctgcctctcaccacgtccagacagctgcctcccctctttttttccccccgcatccatcatttcccagctgcttccttcgagaagccagtctcggtgctcagatgaggccaagaagatctgctggtggcaggttcttagagggctgggcagcttcccttcctagcatagactgatgaatcggattgatcggaagctctaggagggtgtgtaccatccacatgtgtttctgatttggggccagtgcccagtgtgtgctggttggccaccggctgctcagagcccctgctttgctgtctccctgccaatgtgttctgataagtgaggttgtctgaaagttgggttctggagaactgacgttttgctgtaagtcatttaaggtccatgtcatctgccagctgacctcagttttcttgaaattgtgcatgggattggcactatttaaaacattttgaaagtaagcagaacattgggagttgagtgctggggatgtggtttcaggtgctgagagccgaggccctggtgggccaccgggccttctggaagcccatcctctgcagacagcaggcgctgcctgtggccccgagctcctcttcttgccactggcactctcagattggtctcccttccccagcctctgtggataaagctgccttaaaacacagtgaacatgtggaagagaagcgatgcttgttgccatctggacaaacgtgtagactttaggttagagaagtcctgtgtcctggcccatcaggggacacagaaactgctgagatggtagctcagggagcaggagttcgggggtggagggaatctgagcatggtccttgtcctctcagaaaagcagagccgactgcttgcagagttgactgcccccaccgctggcctggaagcaccatccaaatggtgacttcactaactgtttttaagttagcagatcaaacgtatccaaatatgtgaagtcttaacatggagactccagaggtgctgagatactgctggcttcaggaagagtgcgagatgggaggtgcaggctcgcagaaggacagtgctgcgggggagctctgaggaaaggagggttgtttccttcttgcttgctgatggtgagaagaatctggaacttttgtttggaagtgtcctgtgcgttccgtgtctcggtgttgctgggccagctgccctcttcccgggctgttccacggggccttccctgcgagccccgtctccgggtgccaggggctgcatgccctgcaccccggcgtctccctggggttttggtgggagcctttgcttgttgattattttatttgttgacacatgtgcttactctagtaagaacttacggtgactaagaaaagtactcataacccaagaagatatgattaatgagaaagtgaggggagagggagaatagagtgaaaaacgcccaccttgggctctgttcagctgctagtggagtagggtagggggaggctgggaggtgggcacagagttggaactgagctctcagtcaaggcaaagggaatgcccaaagtgtcatttgaatgaattcagaatctgcagatgaaagagcacatgttaaaattgtgcagaagtgaaggctctctgttagtgcaggatttttagagtcttgggagttaaatatgtgcagatgaatatgctttatcctgaggtttagcaaagtgtcgagaaggcaccctgggcccagccagcatgctcactgctgtcggcggaagcgagcacagcctgattctgcacatgctgggcctcaaggtgtgcggtgcctggaggacgagggcttggacgcccagcctggagcagcctggccacgttccgaccttggacccaggctccctgaaagagggagtcagtgaagtcacatgaggcttgtgggtttcagagattttagaaacctgagaaaattagaaaccaggaatggctgagaatataagggaaggcttcacgaaggcagaagtgataccaggtgctcagtgttttcaacagaagcctttcacctaaagccgtggagaaaaacctgcctgagaccaagtgcaagtcatttcctgtttgttgcatgttgtgtctgtcaaatagactcaggcatttcaggaagctcaggtgcagttgggcaagtgaattgagtactgagaagaggtgaaggaggccatcgtattgtggaggtggtggggtacggagagcctcctgaatcaggccctgccacgtgtttatccatgaggttccacatctgtgctgtgtggcccttggtgttgctttcgtggtcacctgatacattttgtggggccagtttaaaaagtagataagacaattcaacattattggcaacttagtaaagtttttggacgaaatttgttttcaaaaaattattactctaagcatgttaattggaaaattggaggctgtactgaggtgtgtggagtagggcaagcaagacccttcccagcactgtccagcccatcctgcgagtgcgtcctctggcttcagggctaattgaaaatgtgcttcgaggcacgacaggccgcagtggggtgtgacagttaagaaaaagccgaaatgggcactgctgggcagggtaaactttattaactgttgaatgactggaaaatcattttaatgtttcagagctgttttaaattatgtgtctgtctacgcatgaaagcgaatctaaattagtattgggctttggcatgaaaaggctgtggtgtcctgactctgggtggtgacgtctgtgatgcttgtgatgctgctgtgtcgtcctatccaggacaccagaaactcagattcgttgcctgcactgaccgggcactgtggagatgcaggtgtccagtttcctggcgggctcgttggcgtccctgcctgtgattccgctccctggagtgctgcagaggcctctgctgcctcctctccttgtgcacgtggccgcacacccctatcggggctctggcccgctgcgctgctcgcctggcctcgcagcgctggcattgtgcgtctttcctccacctggccagctcctgacacccacatgggcagcttcaccgtgaccatgcccctgcggcgcactgttcttccttctggcccagccctgaggcttcccctgaccactgtgggttacctgtgcctgccattcttttttttgttttttttgagacggagtcttgccgtgtcaccaggctggagtgcagtggcgcgatctcggctcaccgcaagctccgactcccgggttcaagcgattctcttgcctcagcctcccaagtagctgggattacaggtgtgtgctcccacgcccagctaatttttgtatgtttagtagaggcggggtttcgtcatgttggccaggctggtctcgatctcctgacctcgtgatccgcctgcctcggcctcccagagtgctgggattacaggcgtgagccaccactcccagcctgcattcccattctttaccagactgtcagctcctggaggccaggagtcaggccttccttaccccgccccaccacggcagccccaagtacaggtgattggatggagtgtgcatgtatgagtgtgtgtgtgtgtgtgtgtgcgcgcgcgcgcacgtgggcactgggccctggtgctgcagagctagcagggctcccttcgaagggcttctgtgtcagagtttaccaggagtcccactgtttaccttgttactccacttgcccaccgcccccaagtggagattatcacacagagttgcatgtctagatagcaaaacagtccttgcctccgagttttatcttgcaaaatttcaaacttaaaagaatgagtacaacaaacagctatgtacaccttccctagatccattaattcctaagtttttttttttttttttgagacagagtctcgctctgtcgcccaggctagagtgcagtggcgcgatcttgggtcactgcaacctctgcctcctgggttcacaccattctcctgcctcagcctcctgagtagctgggactacaggcgcccaccaccgtgcccggctaattttttgtatttttagtggagacgggttttcactatgttagccaggatggtctcgatctcctgacctcgtgatccgcctgccttggcctcccaaagtgctgggattacaggtgtgagccactgcgcctggcccatgaattcctaagttttgagcaaagcagttttaacctgtagctgacacaggggttggtatttatgggatgcaagcctgtgcctttgttgagtatcattggaggcttaggcaggtgctttatggcactcctgaatgtgagctcactgtcgggaaggagatctgtgttggaggtcaggtggatgccagcctcactgaaggctgctcacgagctttttagaagcagctttgggttgaagtttgcagcagggctctgctcccaggctgtggcttgacagacacgcatgtgcactgtacctgttcacggaggtgtgtccatgtgctaagaatttcctaaagtgatggcgccagatacagtcgccccgcagtgttctcgggatggttccagggccccgtacgcacatacaagttccctgtggaacccaagcgagcaaaacgtcagccctctgtgtacgtgggtttcatgtcctgtcaatgccgtatcttcagtccttgcttggttgaaaaaaatctgcatgtaagtggaccctggaagtttgacccatgtttttcaaaggtcaactgtaatatcctgaagtatttttaccaaaatacctcagccatttaaagttaacttaaagagaattcaattcaaggaggtagcatttttttggggggtatgtttgagtttccagaagccctggtaggcaaaaaggccagaacccgtgtgttgggtgggtctgtccctgttggtcactctgaccggccccccttagcacctccagcatcccagagcaggtgcggctcctgggtgtccaggcctctgctcagtgctttagggaggctcagctgcaggagcagagcacgtgtgggaccctgcaccatggagaggtggctgtgagcaatcagatggcttagaagctgcttttacaacctggaaaatgcaattcagaatgatacaactcctggcctggctgactggttgcacgacctaggccgccgaggtgaggggagagcagcccacccagcagggaactgagaggggtcaaggggcaggcgggaggctgtttctcagtcactgtttctttgccccgtgcgcatggagcgatgtgggccatgcctgctgtgccctccgttgtgtgttgagggcttggtgacagtcagtgttgcataaacacctcttgaatgaatatgtgatttagatgtttgtgaggtaaagttaatgatttttttaggaatccaatgcagaaaattaattatttgccaaggttattttatcctgttctgaaaatggataaatttgacacagttccagtagtatggttttgtggttggcaggagaaacggagacaggtaaggaattagcatatacggtgggagaggatgggcctggggtaggcacagcacacctgtgcattcactaaacttttctccaatctgttcatttgtgtgaacttaagagatttaatccctgagcccagggagcttgcgttgaggggggagacagacgttagggaatgactaaatcacaaaacagtcaccgaattgcaactgtgataatgccaagggggaggagggactgtgtaggccgatgctgaaggctgggtgaaggttttccaggggcaagtcccatcagtcacagtgcccgtttagggtttgcaccttgctcttttgacgacgctgctcggctctcagggctgcgaggctggcttcttcccaaacttcattccactccaggtttctgcactgggccctgagagccacatctggccatcactacagatgcacttttgcagtgcctctgcattttgaggtgaaagacagtctttaaacttcagggtgaacttctcactcggagtttggtgtattgttgccatttcttttgtgttgatttgcacgtagctcttttgtacacaggcacgagggtaagcattcctgttgagtcgcagaggaattaacgagtgaaacaaatcatgagtagaagtctccacgggttggtgttttaactttgctctaaggtgagcaactgcgtatttgtgaaatttggccaaatgatgaggggatgctgagttggctgactgctgtgcagaccacctaaggaataaggataaatcctagaatcagagcccgggggagagtgttgggcccagctctccactcacggggcggcagcaagccgtgggtgggttggtggaggccccatttctgcctgcggagcagagctgctgatccttcaggagaggctgctctttcctgtgccgagtgtggcctgctggattcgtgtttctgcggagcctggctttccagagggtgtggagggtgcgcgcagtctgtccacctgcggctttgtggagatgggggctggagccagctcccacagagctggtactttgtggcctgctcctcaggcctgaccacggttccttctgcgtcattttgggggatcccttttccatcaaaggagctagcttggtgttatttttcagagacttgagcacgcactttcattcggaggctgggagctgagaacccctgcagctgtttcatgctccgagctactcagtgagatactctgttaaaaaggcagtgtggtggagggtgtgatcgcttggggtgccatcgacagcacactcacgtccctgtgttgctcacggggtcaggtagagtaaaactcattgaacgtggcctggtttttgtgtgtggtggtgaacagagttgttaatacgactctcgggcagctcctagtgttcttaagaggcagggctggtgggggaaggtcgtgtgctagctgtgaacttggcagttattttcactcgggaaggacgttgggaggaagaggattaaaactatgctttccgttattttttgccgggagggttgtacctttttcttgctctctaagggctctctgcgtgtgttttaagagctttactggggtgtgatccacagcaataaactgagcacatgtaaagtgactggtgagtttcgacaaatgtgcatgcacgtggagccatcaccccagggtcagcatggtgaaccctacccccagcacggcctctgcctctctctagccctccttcctgtccctcccacgccccttgtcccatctgctttctgtcactgcaggggagtctgtgtgttttagaattttatataaatgcagtcagacagcgtagtagtctgttcttacattgctataaaaaaatacccaaggctgggtgacttataaaggaaagaggttgaattgactcacagttccacatgactggggacaatcatggcagaaggcgaaggggaagcaagtaccttcttcacatggcggcaggagagacaggagggcagaggaaactgccatttatgaagccaccagatgtcgtgagaactcactcgctatcatgagaaccgcctgggggaagctgtccccatgatccagtcacttccctccctccacacgtggggattacagttggaaatgaggtttggtggggacacggagccaagccatatcacatggtgtgtactctctcttttctggcttcaactcggtgtgattatttgagagtcatctgtgctgtatcagtagttcatcccattttatttgagtgcttttccattatagatacaccagaaattgtttatgctttcatcctttggtgtactttggagttgcttccaatttatggctatcagaaataaaactgcttggaatgacccaggtacaagcctttgtaaggccacacacttgcctttcgcttgcttaaaacacctcaggtggaatggcaggtcctacatgaggagtatgtttaactttctacaaaactgcagggctgttgtcagagaggctcccaccagtggtgcccaggagctctggttgctccacatcctggagagcacctgatctttttagttttagctattttagtgagtgtgtagtggtgtcgctttaaggatttaatttatgtctccctaatgactaatgatgttggggctctctccgtgtgctcatttgcatccgtctgccacctttggcgaagggtctattcaattgcccactttttttttttttgagacgcggagtctctcagtgttgcctgggctggagtgcagtggcatgatctcggctcactgtaagctccgcctcctgggttcacgcgattttcgtgcctcagcctcccaagtagctaggactagaggtgtgcaccaccacgccctgctaattttttgtatttttagtagagatggggtttcgccatgttggccaagctggtctcgaactcctgacctcaagtgatctgtcctcctcggcctcccaaagtgctgggattacaggcatgagccaccacgcccaacctgggttattttcttactgagttttgaggattctgcatacattctggatccaagccctttattagatggatgctttctaaagagtctgtccgttctgtgccttgtcttctcattctctagcagtgtctgctgaaaagccgaagtttaacattttgatgaagtccagtttatccttttgttcttttatgcatttcgtttctgatgttgtttctaaaatttctttgcctaaccctgggtcagagaaatgttctcctgttttcttctggaagttttaggttttacatttaggtctggatccattttgagttgatgttggtacacactatggggtgtcggtccaggggtttgcctgtgtctgtccagttgttccagcatgtgagaagcccgtcctcaccactgaattgcctttgtccatccgcgtgtgggcctgcttgtggactctgcacggccgtgttgatctgtttaactttgcaccaacactgtgctgtcctggttactggagctttttttagacggggatctcactgtgtcacccaggttggagtgtagtggggtgatctcggctcactgcagtctctgtgtcccgggctcaagcagtcttcccacctcagcctcctgagtagctgggaccacaggcgtgcccacaccgtctaatttttgtatttttagtagagatgggacttcaccatgtttcccaggctggtcttgaactcctgacctcaggcgatccgcctgccttggcctcccagagtgctgggattacaggtgtgagcccggccctgagattactggagctttctttttctttctttctttctttttttttttttttttttttttgagatggagtcttgctctgttgcccaggctggagtgcagtggcatggtctcggctcactgcaacctccacctcccggcttcaagcgattctcctgcctcagcctggcgagtagctgggattacaggtgtgcgccaccacgcccagctaatttttgtatttttagtagagacagggtttcaccatgttggccaggctggtctcgaactcctgagcccaagcagtctccccgcctcggccttccgaagtgctgagctttctaatgcatcttgagatcagctcgtgtcagctctctgactttttctggtttgtttggtttgagagggagtctcattctgttacccaggctggactgcagtggtgtgctcttggctcactgcaaccttcgcctctctggttcaagcgattctcgtgcctcagcctccactacaggggtgcaccaccatgcccaactaattttttgtgtttttagtagagacagggattcaccatgttggcctggctggtctcgaactcctgggctcaaatgatctgcccgccttggcctcctgaagtgctgggatgacaggcgtgagccactgcggccagcctgacctttttttacagttgtgttggttaatctaagacttttgcatttctgtatgaatttcagaatcaccttgtcagtttctacacaggaggctgctgggactttgggatgcattgcttctgcagatcagtttgggaggagttgacatcttaactattgtgagtctcctgacccatgaacacagtgcacgtcccttcacttgctcgcatttttgttttaatcagcattttgtagttttaggggaggatgaatcaaagttcatgattttacaatagtatctgcaatgtgcggggggggggctgcaagtgctggaccaggagctgcgtcagaagtttaatttttagcaaaatattcgggttacagtggtggtagcgcctgcgccgggcagcacatgttcccctgtgctgctttgcgccgtcccttatgcctgccaaaccccgagaggtgggagagaacacttgctttagccagaacaggttagaaggaagatgaggctgtgcatctgtcacagcacagcacccgcttagagagaaagccagcctgtgtaaggagcgcacgctggattctggaggggccctttccacatctgggccatcaccacgtgtgttctgtccaccactggtcccagctggtagcatggagagggttcgaatgtcctagttacagagggaagtgggcctgcaaaccctcaggcttcagaccacccctttccactgcagggaaacaccacttttgctcatctctttggcccttttggtagcttattccttgaggaccatgctcctctctgctggggatgaggctgcctgctggtggctccgtttgtgttttctgggccttccagaggggctgcctttattctgcagccagccctgacccttcccacctctccatgcttgggtgaagagtgaggcccagggcagctgactgacagcacagctgtcctctgcgttttcctggacagaaaccatcgcaggcccacccacctcctgactgcacaggtctccacggcgcagacactttcgtgataccattataaatacagctgggaaagggagggagggattttcttagatttgtgtccccaggggtccatcctggggtgttcttgcccctctaagaccttggcgggcctggagggcccgctccgcctctgatgctgtccgccgctggccgctgtgtgcctgagtttcggagcgccctcccgggctttggacctgccctgctccccagggatgcactcactcacagagcggccactgcacacagtgcctctctgtcgccgtctgaggtgccggctgtctttttttttctttttttaaatatttaaaaatgtaaaactttaagtgagactctgtttcaaaaaaaaaagtatagaactttaatcatatgcctgttttgaagagcagagctttcagtgagaaacaaactctgctggcccacccacccccttttaactgcctctcagaggggaccactttggaacgtgtatccacatggccctgcctgtacagccacctcctgaggttgccgagtgagtgtcagctagcgaccgtctggctgcccagccgcagtccgcagagccccggcccagcccacgcagccctggccgactccgcgttgggcgcgcacggcccttggctgtgaacacgctgtttgagtcgagccaagtgctgtgctgcttctgctccctgtgcaggcagctgtgtctcagcagctagaagggctgtgggttcccaggtgcttactgccctgtggccagccccagcgccctggccctccggaccctgtgcctggccatgcctgttcctcccttctgcttcatccttgagagtccccttgtttccttggggttcagtcccatgtttcctggatcctgtcttttgttttcttcacttattcccttgtttaagtggcttctcccttcttacagaatataccttttttgagacctagtgtgtctgaaatgcctttttttgcctctgagccttggtgggtggtttggcctggcgttgagttccaggtggaaggtaatttcccggggggtttcgaaggtgctggccatctcttcccgtttctgtggagctctcagggctgctgagctctccttccccgtactgtggctgggatctgtgtttttcccctggaaacacggggaaggtctttccttcccagtggtctggcttctgtggtgaggctggtgtgcgcctccttcctcatgttcacgctggctccagcaactgctgtcctttctgtcctcctagaatttctgttgatcacctgttgtgttttctggaatgctccttcacattttctcatctgttcttccaagtttccactctctttttctatactgtattcagggggaatgcctcggtgctgtcgtctggtcatcccaggaatttttaatttgactgtcgtattggataatctttgtgattttgaagagggtttcttgcttattttgatcagttcactgctttggtgtctgggttgatgctgggccttcctcaggtggctggtggtccctggctgtttgcccatctggtggaggggctggtattgagctgcgacatgacggtgagatgggacagaagtcctaacaaagcttcccattaccagacacccagaaaggctggggaagttggataaatgttcttttaaatgaagagtttagcgttctagaagataaggaaaaccagcagggctcagacgtggagctggacagcagctgagggttgggaccttgtgtccccgtgggctggcaggggcgactgttcagcgcctggctccgtgcccctgatgcttgtgccagagagtcctgtagcctcaggaggagagctggggctgagagcccctcaggaccagaaagagcccccccaccggcagagggcacagcggtgcctgcagcctgtcctgtgcgttgggagggaggaaatgcccctctgagaatccacaggggcctgtcgtcctgggctggggctggggctggtgccatgctccggagtgacttgcatagcaggatggtcacagccctgggtttggcagaggtgaacatggacccctgtggagggatgtgtcctgacctgggctacacaggagagccacagacagagccaagccagggcgggtggtgcagggccaagaggtagccggggctgggcctcaggaggccagggcggagtccacagccccaggcccagggccggggtttgtgctgagagtgcggggcggcctgcggcacccggcaaaggcatttcccccacaggtgggggttcccagggtgcaggtgcccgtgtggttgtggcacagcttcgcatgctctacattttggcttcaagtacagtaaaagtgttacctacaaaaggaatcaggaaaactgttgtgtggggtaagaaccctggtgtttctcctcagggagggtgggattcactcacactgtgggaatcggtggcggcatgctgagctggggacgtgggtccctggaaggctctgggggaggcactggtcaccactggtcaccactggccactggccaggctttggaggagtgcacgctgctccttccccagggaggcgtctcgtggccactgctggctctgcattgcccgcctcaagcagtgtggccttgaaccgctgggagagtggagagtttcacactgtttcagtttcaaaacctacattttcaccataatgaaaaatagaaaatagcttaaatcttcaccagaaggaaattataaacacaatttggatgaaatagtatgtagccacggacagttacgtttctgaagaatgtttactgccatgggaagtgcgcccggggagcgggcagggaacgggggagctggcagggaactcgggcgggtggcctccgtggtccttacggcttccaagtgcacggtgcacactgagtggcacctgagctgtgccagccaggagaggggcttcaggaggtttccattgttcttgtacttctctgcacttattaaactttctgtgaagaacacttctttctgtggtaaggaagatattaggacaattggaagccccagtgcggttctgttagctggaccctgacccattgtggtggttgtatgtgcacattggctggtgtggggttttggctgtgccatgaaggagtctccaggaaggtggggtggggcagagagaggggctgtgagctggggaggttgcgggggaggcggcggtggccacagtggcccggtcaggaggcagggtcccaggccccagcttcctgaccttaactgttaatgaccttcagggctatgccccatcccgtcaccacctggaattgcccatcttggttggacgaggatgctgagggtctttgggacggatgtcgtgtttcttgttgcaggtttgactgcttcctccctgactcgagggctgggtgcgtggagccggttgtgcctctgtatccgagagccctgctccctgtcatccttggctcctctctgcattcctcacaaagacctgggtggggacacggccagtgtcccacgtggctctctctggggagctctcagacagaaccctccgccctggccttggggtcccatctgtggggcggggtgggggccacacctgccacgtgtaccctgctgcaagtgcagagagaggagtagaggcaggaggggcggctgcctttcgtaggtcaggtgccgcccgtaaccacggttgattactcttaaattagttatgtcttgagacggagttgcacttctttgccttggcgtgaatagatgctgctggattatttgtccgtaaacagagctcacaggacccagaactgtgagaacctctcggaaacatggcgtggatgcagccgttggtgttctgagtgtcctcagatcatcacacagtgtctgactttgctttttggtacagtcaggctgtgatacaataaccagggaggcggacaagaaagtccccagtgacagcgcctcttatgtgctgtttgttggaagcaaacctcagttcggcttaggagacgtggccactcgcgcttggttcacagatattttcaatgcctcgagaagctacgttgtacctgcctgaagtcacatggtcacttcttgtgggacgtttgattccttctccaactttcctgaccacaagggacactgggcccgaccacagggcacattttcacagtgacccatggctgtttccctacacttctgtgatgtccagaatgccacttttattttgttagaattttaaccacattgctattttgttaatacttttttttttgaacgtattcctttaaatatatctggatacttttttttttctttttttttgaggtggactcttgctctgtcgtccaggctggagtgcagtggtgcaatctcggctcactgcaacctccgcctcccaggttcaagcgattctgcttcagcttctgaagtagctggattacaggcatgcaccaccacacctggctaattttttggatgcaatttttttaaattattattttaattttttgagacggagtctcgctctgtcgcctagactggagtgcagcggcacgatctcagctcactgcaagctctgcctcccaggttaatgccattctcctgcctcagcctcccaagtagctgggactacaggggcccgccaccatgcctggctaatttttttttttttttgtatttttagtagagatggggtttcaccgtgttagccaggatggtctctatctcctgacctcgtgatctacccgccttggcctcccaaagtgctgggattacaggcgtgagccaccgtgcctggccttggatgcaattttttaaagcacaaagctcctgataattaaagtctcttcactcactatgagaatgtcaggtttgacattgggtgtggaggcactgggacggacactgaagcctcctttgtcctgtttccgtcccattcccatgtgtgcacttaagtctgcgtccattattggcttctcagaattccttaaaaacattttttttttttgtttttaggagatggggtctcactctgtggtccaggctggagtgtgatgatgcgatggtagcccactgcagcttccagctcctggactcagatgatcctcccaccctagcctcccaagtagctggaactacaggtgtgccaccacgcctggctaattaaaaaaaaattttttttttgcaaagatggggtctcactatattgcccagtctggtctcgaaccagcctcaagtgatccctccatcttggcctcctaaagtgctggatttcaggtgtgagccaccacactcaccctggcttctcagaattcttgaggaggaggagcaaggtgtctccgaatgcagtgaatgaagtgttgggtttgaggacattgtattagcgtactctaaagggacagaactaataggagagatgaatctatgaaggggagtttattaggagaattgactctcaggatcacaaggtgaagtccctcaataggctgtgtgcacctgaggagcccggaagccagtctgagtccccagatctcaaaagtagggaagccgacagtgcagccttcagtctgtggccaaaggcctgagaacccctggcaaaccactggtgtaaggccaggagtctaaaagctgaagaacttggagtctgaagttccagggcaggaagcatccagctctggagaaagatggaggccggaggactcagccagtccagtccttccacgttcctctgcctgctttattctagccacgctggcagctgattagatggtgcccagccacattgacgctgggtctgcctcttccagtccgctgactcaaatgttaaccttctttggcaacaccctcacaaacacacccaggaacaatactttgcattcttcaatcaagttgacactccataataaccacatacatgggggtatttaccaggtgtcttgttttggggtccccaggcgccgagtgtgcttgggtgagagtggaactctccctcgttacgcgcagcagctctggcggccacatggctgatgagtgcccacctggctttgaaggctgtccttgggcactgtgggcacagactcggagacggagccttggaggcctttcctgttacttcgttcccgagctccaggcttggagattccagcaggttatttgctgcagctgggtgtttggtttttgtttgatttcagcatggtttattttgaaaggggcgttttggggggaagttttcttaatgggcataaatgtggctttttggatcaagaattttagatgttagcccaggagaggcatcaccattattcttgataccatgctgagtttcgaaagagctggagccgacagccctgagagtgccccagcgtcatagcgcaggaggaggaagccccacgctcatttgtcatcatgaccaacaggaggttttcaggccttacttcatctttttcgaggttatcatttcccattctccataaaggggaggaaggagaggctgggaaacgcagtggccgccccctgtgccccgtggcttggccagtgtgtgatgggtggtggggacggccggtggcggtgcctcattgcacgtgtgtttagtttctcagctccttggtgctgggctgtctgccgaggcttcactcgggaaagagtgcagtgtttatagccctgctcccacggctgcatccccacctctgtcatgggaagttaaatttaaaagttggacaattgtgttgctgtttctaatggaatttatgatataactggttgctgttttttgaagctaacattaatgccaaacctgaatggcaggatttgctttcctgtggtttagctcaagaaccatgacgggcaaatggttctcctgtcctaagggttgcgtcgcatctgcgcctgtgttgtggttgtcagggcagtgtgggggcagcactgccctgcctcccgagaggagggttctggtgaggagcctcgtggcccaccctccctctgttgggtctgggtgtcacaggacagcaggctgggagaccctggagtatgggccgtagacatggttgtgccctctaggcccagcccagcggacgtggccctggcacaggcaggaggtgggggcaaggagactggcatgtctgtggggtgtatgggctggttgggggcatgggggcacgtggtgtggccggtggaagccattgctacactgccttgctgtccagctcattcataaaaggaaggctcaggtgccattttttttccatggccttttaacaacctttacagtttttttgtcttgtataccatcttgactcacaagtgtgttttgagtttgggggattcgtgtgtttaagacttgatttcctttgtttccttctcacagctgtcagcttcccctgggtcaggccagggcctcctcatggctctggggtggttgcgttcctgacgccaggtctcctttgtctgcaggaatggtcctcgtccgaagtgagaatgggcagttgttaatgattcctcagcaggccttggcccagatgcaggcgcaggcccatgcccagcctcagaccaccatggcgcctcgccctgccacccccacaagtgcccctcccgtccagatctccaccgtacaggtgagtgcacgtgtgccctggagtgcgaaccccttccctgcccagcccctctccccacgcatgctggggaaacctgcaagggccaggcacagccatgggagtgaggactgggaagtgtgggcggcgtcccagtcccatccgtcccatctaggatgggcccgggacggcgctgctctcctgtcctcctctcggtggcagggctgtgcctgtctcagagacaccagctcccgcagcccactgcagggcgggccgagtggggtcaaagtgagcagtccagggttggccgctctggccccttcccttctctccctgtggcttcaccttcctgtgcctgtcccctcatctgcaaagtagagatggtgctaggactccactggcaggaccgccaccagcgccgcatggagacttttaaggcaccaagagtcctggagccgctgtgtgcgagtggggttggctgctgctgttagggggtgccagagggacacacacacacacacacatacacacacacacacacacacacacacccacacccccgcgtcagccttcagggccgaagctcccgactcctgagctgtggtagggagcacggattcacacacacacacacacacacacacacacacacacacacacacacccgcgtcagccttcagggccgaagctcccgacccctgagctgtggtagggagcacggattctgacttggagggcagagtgcccaggacttgcctctcccggcgtgtgtctgtgtctggccccatgactgtcacctgcacgtgcccgcacgctgcgtgttcctgccccgtctcctgccgtgtttccctggcactgtgatgctgctgctctgaatgacctggcaggtttgtgaagactggaatgacttgatcagcatccttctcctgctacgtgagctgcgtaccctctggagttgtgcctctgtcccatagacagggacgtggacggacgtgccggaggctgccagagaccacccagatctgaagtagcacagaacggtgtcctcaagtctgcagcatctgtctgctgagtgggacactgtggaagacactcgtggcttcacttgcactgtgggcatcccattgcagtctgccatctgctctttccatgtcagtctctctccgacaaacttcatgggctcaggacttgtggcgtccctctgtcctgggcagccaccttccttcccctctctggcactgactggccatctagcctaggggcggccacctccctacccctttgcgacactgactggccgtctgcctttgcatcctttttagtgattgttaacgaggtcacaagccagcagcacgaggattgatttctagatacctgcgttcttcagagatgaccttttgtagactctgttaagaagcctaatgatatgtttattgtagtataggaaaatgtttgtcatacacttgttctttggtaagaaaactttagaattacagtggcttcattgcagatcacggataagcctgggacccacttggatatactagttacatatggaaggaataatttctgtgtacctgggggtgggaattccttttacttgcgctcgttttaggtgactctgcttatttttcaggcacctggaacacctatcattgcacggcaggtgaccccaactaccataattaagcaagtgtctcaggcccagacaacggtgcagcccagtgcaaccctgcagcgctcgcccggcgtccaggtgagagggcaggcggcggatctcttgaggctgcaggggccacgaagtgtgatttctttgatgcagagatcaggccttaggagtttttttttttttttaaactggatactacgtcaaatctggggaggaaggttctctgtgaagaaagtgctttttctttgaccaccaacatgggataagtcaggatttctttttttcttttttcttttttttagtcacacagaatttaacaccagcagcactgttcaagctttccaccatgttggaagcattaaaactatgtccttactagtacttgatcataaggcatgtctgaagcagaagcagcctgcggtgaggacagtgtgtgtgtgcacatgtggccttgtgtgtaacttgaggacggcggctgtcgctaaggtgaacgtggccgaggcgtcgctctcactgttgcaggcacatggaccgtaactttcaccgcaccctgggaagcagatgacatcgctcccttcatctcgtggtgcggcgcttacactgaggcaagggaggctctgggactcactcccggccatgccacctgcacggtgcctgccacgccacgctgccacctgccgctcacatccctcgtctgtagtgagagcatcgttctagaagggttctgtatccaccctggtggccgctggtttctagaacagcgttttcatctgcagagaggagcgtgtcccagagcaggtgctggcccctctcctagtggtgctgatgctcctgacagctcagcctttggcctgcagatcccagaagggtttgtgtgcaggccaggctgttctggaaggggtggcggaggtgtgtggaggggaaggggctggccggtcagacgcacctggtgagggaagcagctttctctgggcagtcagcaggaagcagctgggagaaaaatggttcaggggtttttcttggtcacctggtgtctgtgagcatccgtggatgcgtaggtctctatggtgttggtcgctgctggtgaagcacctgccatgagccaggcagtgggcctggacgctctgcagagagatccagagtccttgcctcagtgccacaggcccttttcccattgctcagtggtgaaatggaggctgagccccagggggtgtggactccaggggcagctccccccgcaaccccggctcttctaccctcactgggtcatgtcctggctggctgcagctgcagtgggtgaaagtgggtggaagggcggttcagtaccagggagatgtgtgctggcctttggtgcaggccccgcccttggtgttttccctgaaggagcttgctcagtcctgtgctctgattggtgcgtctggatttttggttacagtgacttttttgagaaggtagttggagcttatggttaagtttttgcattatacttagtggcagacacaatctggatatcatctgagtgaaatatgtgttcttaggagtggaagtaagtgtgaggagtcagttttgatgggaaagaagactcccaaaagatgaggtgggtcctgggtactcccagggtccagaagcagcagcttggtgtgtccttttatgttttcttcactggaggtttttatttgatgtttttcagttaaaaaaaaaatccatgcttattgttacaagtgaaaagatacacagacttagaaacagtccctccaccctgctgcctcctcacagcccatccgcacccctctggaagcggggctggttcagagttgcttcccacgtgctggcggggctgcacccaccgggagagagctcgctgctccggagccattctcaggcttacactgccccctgctttcagaagttgcaaaggagtgtttaaaaaattggagacagaaaatgttgactgctagatttatacattggaaaagtactagtttaaaatatcagtaaacatttgcattctgattattcatgtagaatggaaatgttaggaatcgagtacaggccactgagttgtctgagctaccttttggcgtctggctgttcatttgcttagcaaagcagcccctcctttctgacagtttgacactgatgacccatcctccattgctcgaatctgctctgaaaactcccctctgtgggaggcttcttgttgacactcacttttggggagtaaagaaaggtgggtttgggtgattgcagggagctggggaccctcccctatgggaggctgcggctgtggagccctgaccgccctgtagccagcctctgcacctgggaggatggagctttcaggagccgttcttctgtttgttgttttgatttctgagagatggggatctgggttgcctgttaggattatttactctggtctctatgtgactttttccatggacttctgaggactggggtctctgcagtgcctggctttgtgaacgtccgtttttgatgcaggtgcaaatcatgccttcctcacccgctcaggactgcgatcgtcagggcacagggcaggcctcccagcagcactcccgtgtccagcgggctggcaggtggccggggtccttggcttcctgggcgtcctggccaccgcagggaggcttgttttcttttgctgggcgtgaggctggtctccccctcgtcagctggtggcgtgagatgcccttaccttgtgtttttggattcttgtagcctcagctcgttctgggtggcgctgcccagacggcttcacttgggacggcgacggctgttcagacggggactcctcagcgcacggtaccaggggcgaccaccacttcctcagctgccacggtaagagccactcctttccgtgccttcaaagacggtcaggcccgtggcgcaggtcagaaaatgcagccttgagacctcaggccggcttctgtcccagaccgctcactgcttgcttcacaaagcagtgaacagtctggggcccacgtgagcacgtggggctctgctgctgtgctgtgtgaggtgggctccgagggccttagaccgcagaagtctgcaaacagcaaaagcccaaacacctgcctttgaaaaagtcactggtgcactgtcgcgttgtatgtaaaacagcagcgccacccgtttgtacacactcgtagtgtcggcctgtatcgatacacatctttattaaaacagaagagtcactggtgaactgttgtgttcagtgtgtaaaacagcagcgccacccgtttgtacacacagtgtcggcctgtatcgatagacatctttaaacagtgggccccacttgacgcctttttggtgtttctttgctgcgtacttttcgttgctttagtgaccgcatcctatttggttccttctgtgtccgtttggattggcataggttgtccttatggtcagcaacattgtagcaggcatcttcgcagagtctcttttcacttttttaattatttgcatagctgcattcctagatgtggccttgcggggctgagggagatgctgacttcggtggccatgtgactgatgtggctggcctgccccatggcccagggttccaagaggtggtgcgttttcttgaaagaagtttagagaagaaatatatgtatcttttgtacatatgcatattttagtaaccaaaggctgtgacaaaaatctgccttttaagatttttcacttatatctttttactttaatccaggaaactatggaaaacgtgaagaaatgtaaaaatttcctatctacgttaataaaactggcttcatctggcaagcagtctacagagacagcagctaatgtgaaagagctcgtgcagaatttactggtgagaaaccttgactttacattccctttcccctaaagcctgttgcataggacagacacctgttgctgctgtgacctgtgcccgggaggcctgtgccagcagggagagctcctctggaaggctgcaggcgaaggggaggggtgcacacgtgtcgaaggcgtgtgtggcctagctaaggagactccttcctggggctgggtgttctggggccggcgcctggaggtctcccgggctttgccgttttctggtgcctgcgtcccttgtctgtggctctcttctcctctggctgccccaaccatgctgcactctggtcagggtctccagcaactcccttctggccctctccccactcctgtgtgacctcttataaaattcccaggtgtccgcagtcccggctggaacaggcattctgcaccctgagccaccagaagccccctccccatggagcagaccagctgaggcacattcgcgctccagtggcagagccgtcccccccacccccacccctcccgaaacctctgtcgcagagaacagcactctgtcccctggccggaaggtgggagggaggattcctggcagcctcccctctccttaacccacagtcccaagctccagatctccactcatggccgagctctcggctgtccaccttcctcagcctcatggctgtctcgtggctcagggctgtgctggcgtcagtgggatggcctggggatctggagtggctggtcttaccgtgccttctccttgtccgcctgaccatgtcttccggagtctcttagggttcagtccaggcaccgccttcccgccttgtcgcctgtcttcccgacctttattccacactggcctctgtttctgaaacaggatctggccctcttgctctgggctcccttttgtctgactgtagactctgggcaccctggccgcttgcaggggtgagcacagctgtcatctgctcctgaaggcgcggatgccctgactgtgtggatcctgtctgtgtggcccctggcacgctgtgacctcctgcagcaccgcacttgcagtgctggctttgataatggagttacttttaggctgatctgcctcctagcaaaatgcctgacaccgagtaggtgcctggtaagcactgagtaaagactggcattgagtaagagacttagaaaaagacgagaagtagacaggtgaccctcccaggaggagacgtggtccgcagctggctgcactgcagtgtccagggtgagcgcctgtcacacatgtacctgtgaaaggtgtagcacgcagactttcccatctcctctgtccagtgaaactcggggcggaatcagccgtaaaatacgagaccagagtgatgcgggattcagaagtgtgtgtggaatctcattcaccagaatttcaacatggattttatttttaaggatggaaaaatagaagcagaagatttcacaagcaggttataccgagaacttaattcttcacctcaaccttaccttgtgcctttcctgaaggtaatttcaaaggccccggtgcctgcgagcagtagggccagggaggggtggggcgcagatgcaccaagtgtgcagggcgaggatgctccaggcacggagggtgcacagcgcttgtgctgcctacgggggtggggccggggactcagtgcctggggacagaatgttagttttttttctgtaaagcaggagctcccctgacacggtggccttgtggttctgtcgtgcgcaaggtggtgagaagggcgtgtgcttcctgaaagtgaaggggacggggaatggggtagcgtttgcaaaactggataggaccaagggtttcaacagcgtcaggctgtctctgttgggtaatcattggtatcagcacattttaaaaatcaatacgtatatttgtacacatttatgaggtgtatgtgatgttttgttacagtcatagatagaatcaggatatttggggtctgtcaccttgagtacttatttccatgtgttgggaacattcagaatcttctcttccagtgatgttaacatattttaaaaagttttttaaaaatatgtctctttttgtttgttttcttgaacacattttggacatttgctatcaggaataatcccacttagtgggagggcaggatggggtcctggcccttgacatccagacatgctgccgtgagggccaagatccatcttacttagctcaaaagctttctgtaaaagttgatatttctgaatttttaagcaaggaaaaccgacgcatgagcagccgcctgacccctcgtgtctgtctttccacccagaggagcttacccgccttgagacagctgacccccgactccgcggccttcatccagcagagccagcagcagccgccaccgcccacctcgcaggccaccactgcgctcacggccgtggtgctgagtagctcggtccagcgcacggccgggaagacggcggccaccgtgaccagtgccctccagccccctgtgctcagcctcacgcagcccacgcaggtcggcgtcggcaagcaggggcaacccacaccgctggtatggaaggggcgcctgactggtctgcacagcccaccgtgcctctgctcccgcccgcttcttagataaattggccacggctcagaaaccttttccaagcatgcaggaagcctcctgctagaggaagcttgggtattaccttaaatagttaaaatagaaaccagaggttgaggccctgggatgttgtattttgtctcagtaaaatgaaatagttgagttggctttgaaccaccggcacgtccccgccctgccttgtctggggatgttactggtgtaaatgaatgcagcgtgcttttagaggatcttgtagatagatgttctcttggattaggagcagcggtccaagcgtaagacacgggcacctgcgtgggacaggtgggcaggagactggaggcagggtagcagctcacagcacagggtggatttaggtgagtcccgggaggcgaagccgcggctgctcatagcggttcacttatgtgcagtttggatctggctttcttggttttatagtcatgacgtttgctctgcagctagagaaaggatgtctttgccagaagaattacattttgagcacattccctttcatgggcagagggattcaccaaacgtagaggggcagttttaaaaaaatttcagaggtgttttcttcctctaaagacagcttaaacaacaaaatggtgcgggctccctcatcatgagctggtatgtgttgtgatggtgtacacatcagaaccagctgggtgaggagtagccattagggggctggctcttgtgctctgttcaagttgcatttgtttttgtcttgataatagcgaggagaacagggtgaaatggcatggagggagggtgtcccttataaaggccagggaagggctgagcgcctgtgtaaagagagggcttccttgcctgccttttgactccagagggaaagagatgtgccgtgcctcttgctttagtgtaaggacagaacttccctgttcactagtcagtggagctactttacccaaaaaggtgggttctgtttaagcaggcacagcctgtgggcaatcattttcttgccaagttttgacctctggtgcttagtcacacacaagcagcatgggtgtttttagaattaggtgctgtgtttggcagcaggatcacctctgcattctgcttccctgggctcctcctgaccacgtgtgagtctgcagagcacagccagtgggatccagggcatccaatccattgcctgcaccctgaagcctgtggaggcagaacccaggcttctccctgattcgatgacaggctccctgcaccgcagggcctggcccgggcatttgatggcaggttccctgcgccgcagggcctggcctgagcattgcctgagctgcctgaggctcttcctgtccagtgtgggtgttcctgtttcgttggagacatgtttgcattataggccgcttccccaggtccccacacatgttctgcagcatagagtttacctgccagggcacctttgcaaaatggtagcgactaaattctgaagcacctgggcccagaggtttgaggccaggccttatggacttgagcattggcttttgacaaggatgccagtgtctctaggccccagcatcctggggacagggccagagcataggccatggtcagtgctgccaggttttggatctctgccttgtgccggaggtgagagtgagaggcaggatgacagcagagctgggcagaccctgccacgaggggcccagcaggggctgggcggacagagctggccatgctgggagcagtgggtggaggcccttgagggccaagttcaggcaggacttaggaactctaaccccactccagtagaaaagccctcagccgccttacagaaaattcagaaagggagctgggtttggtagctcatgcctgtaattcagcactttgggaggtcaaagtgggaggatcgcttgagcctaggagttcaagaccaacctggccaatgtggtgaaaccccatctctacaaaaaaaaaattacaaaaattagccagacatggtgggtgcctatggtcccaggtgctcgggaagctgaggtgtaagatcacttgagcccggaaggcagaggttgcagtgaaccgagatcatgccactacactccagcctgggcgacagagcgagacttgtctcaaaaaaaaaaaaaaaaagaaaagaaaagaaaaaagaaaattcagatgagatagaaccacttgacctgtagccaccaggcaacaatgtcacctctgctaatatttggggggcagtggtctgctccatcctgggttgctgaggtcagcaggcatcagtttgccacccgccccctccaggccctgaccaatgcccaggggcagcttctaggcagcagatctgctcccgcttgccccttctgtgctcacacgggcacccctcgcccacgtcctgccctggtctggccgagtccatggccagagcatggtcctgcagcctgctggggctgagctgcacacggggtcttcctaggacttcttactgggggcgtggggtgcaaaggaagggaagggaagaacctcctgctagggactgagtggcccctggccctcggggagcatgctcaccattctctgctggctctgcctcaggtcatccagcagcctccgaagccaggagccctgatccggcccccgcaggtgacgttgacgcagacacccatggtcgccctgcggcagcctcacaaccggatcatgctcaccacgcctcagcagatccagctgaacccactgcagccaggtgagggcctcgcgggcccctggccgctcaacaccaagggctgctcccagagccagctgccattgggcttttatttaattgggtaaaatgtacatttacataaaattggccattttaagtatctagttcagtggcactgatttcatttactgtgttgtgtaaccatcaccactgtcagtatgatttttaattttatgtattttccatggttagcttctttatctgtaatcattcctgcactttaaaaaccttgatgaaatacaggaaaataaatgctcgagaggtacagcttacactttgtactgtaatttagagttattaatatgaagtttttggaaactttcttgtagctaattaggagagtggtagctgtgcccttgagcctgtaaagcaccaaagcacatagttgatctaataaaagccttgtgtggtttccactgtgtgtttgttttgtagtccctgtggtgaaacccgccgtgttacctggaaccaaagccctttctgctgtctcggcacaagcagctgctgcacagaaaaataaactcaaggagcctgggggaggttcgtttcggtaaggaatgggcctgtgtacgttggagaagcgtggccagagcggagaagagtccagagtccgtgctgctccattcccgcccacgggtctttcccacgtggccctggcggccggggctccaaggctcctgcttcacgctcactttgacctcacgttcacacaagtgtgttttcccatacagttggctcaaagaggttttgcttcatacacatagccagaaagcgaatcaactgattatttttatatgaactaataggaaattcattttttagtataacatcgtattttgagttcattgcattcctagtatagaatgcttcactttccatgtattcaacttcagaaccctcagaaatgctgtactgctccaggcgtagtggctcacgcttacagtgccagcactacaggaggctgaagtgggagaatcgcttgagcccgggagtttgagaccagcctgcacaacatagtaaaaccttactcaacaacaacaaaaaataaaaaattagccaggcttggtggtgtgtgcctgtgggcctagctacttgggaggctgaggcaggaggatcacttctgcccaggagttcagtgttacagtgagctatggttttagcagtgtacgccagcgtcggtgacagagtgaggccctgtttctagaaaaataactgctgtgctttgcctgggcctcctggaaagcaggtggtctgagcatcacctcagtcagggaggtgcttatgggacctgagcagtgggagagtcttggagtgatctctgttgtgatcaaggggcggtggagttgtgtgtatttcaggaagtcttactgtgaattttccctttcccagacacttcatccctaaaggcatcaggcagggcatagcaggcctggggagtggctgtggcctgagccagagtcccagcccaagcagggagaggtggccagcatgcctgggcccagcgtgacgctgatacttcagtgagaagggagggcacttagggacatacacgggtgaaagaattaatcaaggctgcaggaagccttggtattttgctgtcaaggagtcagcggcctggcagaagggataaaggagagtgacccctgtgggctggctcaggattggaatgctgacgcaaacccctgggtttcagtgtgtcggcaggcatggataaccatgggtcttgccgtaagtttctagctttgttcaccgcagggtcctgggaacagtaacgccccagtaacactgagcacacctagtgttcagatgttgtcttctaaaaaccgttttccactaaaatgacaaggactcctgagagaaaaggctgattgcgggactgggataaggaaatacaagatgagcggagaccgtcctgtgtcagagagcagtggacatgggcatgacgtggacgtggatgtcagcagagcagcctccctcccatggccgggtccttcagctggagccctaagctgtgcagcccagccacagcccgtgaccaccagggatgccaagaccctgagtgagcacctggagcccataggaggactgggcatgagaactgctgtagagctcttccccgagacacaacgaccccaggagacgccaggcaggcccccggcctcacgttcaaagcccactgctggaggcggcaagtggaggctgcgtgcatgtggaattcccggcaggactcttagctcacatctcctcacgagggggccgaagtcagcctggaagaggacgtcctgcacacagctggcctgtgccttccaggtgtcaggggcagcccaggagtcaggagaggctgaggaaccttccagcttgaggagccggacaagacgtggcagctgggattgggatgcagactgtcctgcagggagaggcgctgctgggaccgggtcctacgggggagggcctggggaggggccattcatcatggcccggtctcaatggcatcctgcttctggaggggatgcccttgtctgtaggaaacacgtgcagaatgttccgggtggaggaaagtcaggttagcaactttcaggtgattcaggaaaaaattgtgcgtactcttcttccaacttctgagcctttaaaaagaatttaatgctgcctctggctttaaaaagctttgcatagatcagacccccacaagtccccgcgctgctcccggctttgctttctctggacttgagtcccctgcgcatctgtgtgtagatgttaacccggcgccaactcacagctctccttccgcagaacaatcgagctttccaggaaagcagcgaggcaccctctctgctgtggcagatgcagcaggtgcaggtgcggggaggacagaggcctggcctcctcacggccctgccttccacgtggggtttcctgcccttaccaccccagcccacctcccgatgaattccttgtacagttaaagtgatcttcccttctttcctcaagggacgatgatgacattaatgatgttgcatcgatggctggagtaaacttgtcagaagaaagtgcaagaatattagccacgaactctgaattggtgggcacgctaacgcggtcctgtaaagatgaaaccttcctcctccaagcgcctttgcagagaagaatattagaaataggtacgttggtgtttaatgactgagttcttattaaacagctgcgctgctggggcatgggagcttcaggtgagcacacctgacacctggtcatgtgttttgtctgagtttgtgatttccacatggttgctggtggtggttcttgggtaaaatatgggtaccactgccttccaccccaccagcctttctgggctccccttgggttgtataaaagcagtaactgctggatcagagattagccgtaaagaaagaactgtgcttaatgattttaaaatactgtttttcttgcctgacctttaggtaaaaaacatggtataacggaattacatccagatgtagtaagttatgtatcacatgccacgcaacaaaggctacagaatcttgtagagaaaatatcagaaacagctcagcagaagaacttttcttacaaggtaacaggctgtttgccgaggagagcgtctttatgttgttggcccccactctctgctggctgggagcctcctccccacaccgaggcagagggcggtgggtcccaagtgcctccatgttccttacgaacgtgttttggatttcttataggactagattttggaaagatttctttttgaggtagggtctcactctgttgcccaggctggagttcagtggcgcagtcttggctcactgcagcctccgcctcgtgggttcaagcgattcttgtgccttcgcctcccaagtagctgggattacaggcgcacaccaccgtgcccaactaatttttgtatttttaataaaagggacagggactcgcgatgtagcccaggctggtcctaaactccttgcctcaagtgatcctcctgacttggcctccttaaatgctgggattacaggcatgagcctctatgcctggcgggtttaccttttggaaggcacctgcctctctctctgggccatgggctgaactggcagaccctgaggtgccgcagccctattctcatgaagcagctcttccaagtaaaacgtgccttcctcaccagcagtcacatatgaacactcttccaagggcacactgggtgaggtggtgcctgctgccacagccgggaggcagtgccttcagggcagcactgaaataaacacacttagcccttgctgtaaaagtagttctgtgttgcagcaaaaaaggtaaatgttactttaagaaatctgacagcatcaaagtgtataaaagggacactctcccacaagtgtgcccctgagacagccaacacgagacttcgttctgtggacgtgagcatcgatagagctctcgggcgcagcatttgcagggtgggagggatcgggtcctcgccgcattcagactggacggagggagggcgttgtgcacggatggtccagtggtgctagacaacccctttgcttgctgggctctcagatttatgacaagcagtattttaactttcttcataggatgacgacagatatgagcaggcgagtgacgtccgggcacagctcaagttttttgaacagcttgatcaaatcgaaaagcagaggaaggatgagcaggagcgggagatcctgatgagggcagcaaaggcgagtgctgggtgtctgctgctgccgtctgggcacctccgtctcagccacaacctgatgagctcactgagacagtggggttttgggtggtcagagcatgttttgggctggccttgaagcaaaggtgatgggtgctgtcagtggagctgcaaagagaagcctcattcatttggcactagcgtagatgcttgaaaagcggggcttcttaagattcccagcacctcacgctccacacagtcacacccaggtgtgaagcacatgttcctagagccccctgtgtgcgctggactggactcttcacactcacgttgtccttgttctagaacattcacagccaggcgaggcactgctcattaatagaatcagacaggagaccacagttccccagggacgggggtgggtactgtggagtgggaggagcacttgctttgatcacagccacaggctgtcccgtccctggtgtgtgggacaggacagcaaggagcctatgaggcccattctgcctgccatcatgcggtcacatcaggtcaagtcagagcctgcgattggtagatgtgtttcaaagactgtatcttacatccaaatgttactgacttttctcaagattactggcttttttcatggtgtgtgatgtaaattttcatctttggctataagcatttcacaaatttgctatgcattctttaacattacctagatgttattgtatagtaaataagataacacatttgttaaatgataaacatttagttcataacttacttttcttttctgcctctttcaaaaatagtctcggtcaagacaagaagatccagaacagttaaggctgaaacagaaggcaaaggaggtgagccctgttagtcgtgagtgctcgtgggcactttgctgtgcactgtagcgccccacgggaggggggctaaggaaaccgtggcacttctgtacgataggcatttgcgtgtctgtttaaaatgtttgccaagtttaaataaatacaacatcagaggtattttcctgtgcaaacagttggtgtcctacttttaaattcaacggtgacttccctttgcggggggcattagtctctgtgcttttgacttgcgtatattttctgagagttttaagacaaacatctgttgcattaaaaaaaatcttattttttggattatagaatatgcttactattgagaaagtcaaaacattaaagaagttatgatttagaaaactacagaaaaccctttcatatctatgtattacttttgtagtaagtaaaaaacatgcaagaaatgatgctccttgtctccttttcaaaataaaagatgcagcaacaggaactggcacaaatgagacagcgggacgccaacctcacagcactagcagcgatcgggcccaggaaaaagaggaaagtggactgtccggggccgggctcaggagcagaggtacggcagtgttgtgggatcgaggtcctgggggaaacatggggaacatcttagagccaccctcttctaggggacggacacacataggggaatttgctttcttaccatttacattttgtctcaccttttctggagtatttgttttacgtttgacattttaaatccaaatcagcttatttgtggctatcacttgagctgaaagtctttttcgtgaggaagtttgattactgtgatgaggtttaggctggatttgaaaaggatgtggggaagttataactgtcagaagaatgatccgaatagggatcttgctgattgtgcttcctgcacagtgtctgtgggataagctgctgtaggagaatggacagttcgtggaatgaaggggaagaattgctgcccgctgctgtttctccaaattccattagtttctcgtctatgtttgtggttgtatcttttagtctaataattataaacccagccttgacatgttatttttgctttcaactgtcagttgtttttttttaagtaaattacaggaagaaagaaaacggtcttttatgtttccctccttatttgccatctccggtactcttcattccttcccgtgggtctgtttccgtctgccaccatttccttttggcttgaaggagagctgttgggatttcttgtggtgcagatctactggtgatggattctctggttttgtttacttgaaaaattgtatttcaccctcattctcttttttttttttttttttgagacagtcttgctctgtcgccaggtgggagcgcagtggcgtgatgttggctcactgcaacctccgcctgccaggttcaagcagttctcctgcctcagcctcccgagtagctgggactatagacgtgtgccaccacgccctgctaatttctgtatttttaggagagacggggtttcaccatgttggccaggatggtctcgatctcttgatctcatgatctgcccacctcggcctcccaaagtgctgggattacaggcatgagccaccacgcctggccttcaccctcattttcagaggatatttttactggttacaaaattctgggctgattttttctttcttgcgaaactttcaagaccttgttccactgtcttctgatgtcctgctgtaatttttaatttttaatttttttagacgcagggtctcactgtgtcacctaggctggagtgcagtggtacgatcatggctcactgtagcctcgacatccccgggctcaggtgatcctcctgcctcagcttcccgagtagctgggactacaggtgcgtgccaccatgcctggctaattttgtagtttctttttttttcgtagagacagggtctcaccatgtagcatgggctggtcctgctataatttttaagcttgttccctgtacgtggtatgcttcatgtctctggcatgactttcaatctttgttttgagatgttctttattttttagaggtttgtctgtgttgtgttttgctgtggttctctggatattcagtttagaggtttgtctgtgttgtgttttgctgtggttctcaggatattcagcctgtttcaggttctctgaacttcacagatctgtaggtcagtgtctttcatcaaatttggaacattttggctaatacttcttcaaatttttttttttttttttttttttttttgagacggagtctcgctctgtcgcccaggccggactgcggactgcagtggcgcaatctcggctcactgcaagctccgcttcccgggttcacgccattctcctgcctcagcctccccagtagctgggactacaggcgcccgccaccgcgcccggctaattttttgtatttttagtagagacggggtttcaccttgttagccaggatggtctcgatctcctgacctcatgatccacccgcctcggcctcccaaagtgctgggattacaggcgtgagccaccgcgcccggctcaaatttttttttccatttcaatcttactttcttctgctggggctccagttacatgtatgttagacctgttgatgctgccctgcaggtctttgagcctgtgttcctggacttcagtctgtcttctctttgttttccagactggaagatgtctactgatgtgtctacgaggtccttggcagatggatttctgccatctccagttgaagtttccattttgttaacttattttgcaattctaagatttccatctagttcttttttacagtttatatttcccctaattctttgagcttattattaaagctgttttataaggtttttgtcaagttcaacacctgggccatctcacattcagtttctctcgactgctgttttcctcggccttgcacactttcttgtctccttgcatgtctcatgcttacctgccaagagactggactctgtgatctcccttgaagagttgattcttgcaggcggttgagttactggctgaccatcttgagtttgtgtggttttgtttttcattttgtcagtaaggatctggggaaacctcaaggtgtttctcaagcccctttaacttagtgggactcaagttgcaaactctgtctttcctgtctgggtttggctttaggctttgctaaggtaggtcttactctagggtgtgatccttacgtacaaggaaaggtcttgttactcgggcaggctggactcccatgcttctggactgccctctactctgcccgacccctgacttctctgtttcgctctcagccccgtggcagctgctgtctgatgcacattggctggtcttgcaccgcttcttggtatgcaggtgcactctgggacagggtcagggtagtgacctgatgaggacagagctccccctccccaccaggactgttggaaatgtgtgggtgggatgtcccagacctccgtgctggggctcgcctgcccacatgctagcagtgacctctgagaaatggctgcctggtgtggagaggagggactccaggtgtaacagacactagagttttggcaatatggcatcccagaggttcagagaaatccctcctgggacagtacaggttaaaatgtctggtacaatgtaggaagaaaataaagatcttgtctttataaatgcgtgtgtgagatatagataaaatagggggattcttctctgggccagaaataagtaagtaagtacagattcccaaggctaacacgggctctggccactgtgtggctgggagtcttggcccgggatgggccccagcaggaacctgcactcacctgggcctaggcctgagtgcccactggctgtgaggcccgcagcccacgctgaaaatgtagttgtataccaagaaagaactgaaattctgaacaacaacaacatatatcgagaagagcacttagagttaaggacttacttttttgtgggggaggtgaaagatattgattagccttttttttttttcctggatttcttttatggttaactgaattctcaaaggcatagattttgtagcccatcatcagttcgagaactagaacgttgtaatcccagcactttgggaggccgaggcgggtggatcatgaggtcaggagttcgagaccagcctggccaagatggtgaaaccctgtctctactaaaaacacaaaatttagccgggcgtggtggtaggcacctgtatttccagctactcgggaggctgaggcaggagaatcacttgaaccctggaggcggaggttgcagtgagctgagattgtgccactgcactctagcctgggtgacagagcgagactccatctcaaaaacaaaaaacaaacaaaaaaaccaaactagaacatgccagtcacctgggagatcccccacccttttatgtgccccaccacatcacagctgcttttacctccctccaaaagtaactgctgccctgactttatggcaaagccaggaagaaacgccaggacctgccagtccccagttgtgcagcgagacactggttagccttgccgtcctttcccattaaacttgacttaaaaggaaaccagaatttaacatttttaaaaatctgtagggccctcccacccctccatcactttctttttcttacaacttgtcggttgaaggaccaggtcgtttggcctggggtgtgtcctgcgtcaggattgctggcggtgcccttgtggtgcagttctgcctgttcctccctcctctgaacttcctgcgcgttggtggctggacccagagactcctccaactctggctgcctccctgcggcaggacgctggctgctcttgtgtcccctcattgcgaggacacgggtctgggctgtgcgccccggggacggtggctggtcatgcttcatgcctagggccactagtcccttgaggttggagatggcggtgctcttagtctgtgagttccttctcacttcctctttggggtgttcttttggagactcttcctccactactgtttggccgcttggtgggtccagctcatagaggagacgcagggtaaacgcgagcatgttttcttccatatatccaggtgaagataatggatcaacaggttgtcaccctcagagggtgaccagtagttttacgttttagtgtgttgtttttattttttaccgttgtgatctcaaggacttgcacataatccatctattacagttctcattttggttgcagttcagactgtgccatctttggccaatggaagcatctccaggttggttcctgagtcacgctgggacgtggggctgatgtccttgccgtctggacgttaacatgtgtcaggctcaccttacacctttcctgtttcagaccgaaaaagtcatttctccaagaactggtttcttctagtgggaaatggcgtttgaagaccactcgctgggactagggatgtcattgctgctggggtgggttggccttttcagtggacagcactgggaaatgtgtgtaaaacatggtctcatgggcttatatgggtatttccaattcaggtagttcaaattcagaggtgtaggagttaccatgttcaaaatgacgtctttatcttcacagtaagaattctggctcttggctgccccaagggcttggggggtggggaattggaggggagggcaggagaaggagagattaaaataaaaggatcctggttatggacataggagataatagaattaaaatatctcctacctttggacatagcctgagaataagaatatgggcactcctgccgagggtggtgaaaacagccgaaagttgttcatgtgctttctcccttggccccgttttgtattttgtgctgtatttatgttgtcgaaacatttagctgttacacaccataagctctccctttcgccctctttgagttttagtgccataaataatgacatgtttaatgccgtgactcgtctttatgttgtgtctctgtagtcattttgatttttccaaatctcattctctgctagattcttttggaacgcttcatgggagcagccactcccaagttcccacctgctgatgagtttgtgccctttgtacctgaaggtctgttttttggctcacgttgtatttactgaagtgtcttaaggatgttactctggattatttcctccctaaagtgttactgtccaaatctaatgagagcctcattttacctcctgtaggccacgtgtttttcttccctgggtgtcctttttctcggaagccggctcatcccactggagtgcgtgctgggcttggttgtgctggggtggtgttctcagtactggctgtgttctttcagtgcggttcaagtctccttaggaacatctgcaataatgatcctttgtgtttgttctgttcttttgtttctttcttcagagagtcccattttccacgtgttgtatcttctttgcctgctggagcactttttacagtctcttaatttttaaaatctctctctctctttttttttgttttttggttttttagagacagggtctctctcacccatgctggagtgcagtggtgtgatcacagctcactgcagcctcgacctccagggttcaagcagtcctcccacattggcctccctaaatgctgctgagccacttgtgtccagcctaatttctctctctctttttttttaatttttattttttgagacagagtctccctctgtcacccaggctggagtgcagtggctctatctcggtgtgatctcagctcatggcaacctctgcctcctggttttcttctgcctcagcctcctgagtagctgggattacaggtgtgcaccaccacacccagctaatttttttgtatttttagtagagacagggtttcaccatgttggccaggctggtctcaaactccagacctcaagtgatttgcccgtctcagcctcccaaagtgctgggattacaggtgtgagccattgtgcctggcctaatttttctcttttttaaaaaattatcttttttgtcctttttggcttccatttctcttaaggcgtgatttgctgtttacctgctgttttgagtatgtgtttctgaggtcttctgtggtctgtagggatgctcttctgctttttatcctctttttctctcatgggagcctgtctgggatttgacctgaatgtctttctgttgctaatttcgacgtgagtttaggtttctcgaacttgtaacaggacacgtggtttgcagcgtttgctgactttgtggtgctcctctgtggttactttcccgtgatgttaagaacgggagtcctcagcgtctgtggctccggggctctgtgcacctcccaagcatctggactttgctttgccttccttgtccctgtcctgctcagtactgattcactcccagcaggttctctcctgcgtgaggccctgtgctgcaggagccctggcaggtcagtgtgggcatttgcggtggccaggctgccctccctggtcctcccctgccccaggtttgactgcggctcttggagggacctgctgctcttcccaggaagtctgctggctcctgggtccaggcccgtcggggtccagttctgcagcgtccttcaggtgatggctgcttgtggttcatcttcatcagttttgttctaaagattgtccgctggcttttggttttgctgtgtcgttgctcttttatgtggaactttgggaagatccagaaactatgctacccctgtcatcgtcttccagaatacattaactttgaaaattacttattttagtttgaagtagttttcaaatctacagaaaagttgcaagaacagagtaaggagctccgtgcagactccggtgtatgagcatcacgctgtctgcttcgtccccgctacaccacatgtgtttgcgtgcactcctgtactttttcaatatgtacactttaatccttgttctgacacgatacccagcaccctaaatgctcgtgcggctgataccttaggtggctactaggcagccctcctggtcaggtgcttagcactgatgctaccacccccagcatagcacttgctgtgggctgtgtttctccacagcgtcgtggccgattcccatggccgtgttagcatttcacacgttcccacctcacacagatgccccacccttatcgcacctccacccacagcctcaatgttattaaccgcctgcctgtgtcgccacccctggggctgctcagtcgtggggatgcttcaggcaccccttctgttactgctggttgccctctgctgggaagcagagcttcgcccctcctcgttggtttattcgttcgctcatggattcgttcactcactgcagtgctgtggatgccagggtccctcattcactcactcactgcagtgctgtgggtgccgggatccctcattcactcactcactgcagtgctgtgggtgccgggatccctcattcactcactcactgcagtgctgtgggtgccgggatccctcattcactcactcactgcagtgctgtgggtgccgggatccctcattcactcactcactgcagtgctgtgggtgccgggatccctcattcactcactcactgcagtgctgtgggtgccgggatccctcattcactcactcactgcagtgctgtgggtgccgggacccctgttgtgtttggtgggctctgatcagcactctcattatttctaggcttgcttggtgggagcttcttgtggctggagtctgtatcctttgacacttccctcgtctgtggcattccttattgccacgtgcactttccctgcccactctgcagcttcccctggttcctctagtagagtctggtgttgagaggccaggatcggggcacttggtgtgctgattgctggggcccctgctcccaggccgtgccagcagccagagctcgggacccaaatgcatgtaggggagtgtgtggtgtgcgcccttccatgtcgaaggggtcctgtgtgttcgtgttgagactacggtccttgcctagcacgccagggcttccgtttagccgcccccatccttgtctattggtcccttctcagacagtgaggaacctggttcccatcattcagtgtatttgtttttttcttccgtgtaaccagcttcccaaccattttacctgctggggtcgcggcgccaggagggaggattggatgggaaaggcacattgatgaactttggatgtgagtgttaacgtgtgtggagtagcctctagggaagagtaagggagctcgtgcgtcctcactcatgagaagggccggggtgtggggctgggaggtacgtggagtatcgagaacgccggacctggaggacccaggtgaggcactgccgagtgggtgaagattggcgccggcgtctgtttggggagcagttgtttcgcagttgtttcgcttgccttttgtgaactttggggatctttgtgtgttatctgtgtaacaattcacacaaaacccagaaagtaaaagtccttcagacacctttcttcatcaaagatgatgctcagtcattcttttcttcttgtaggatacctcttaagggtaagtcttctttttttaacttttacttttgaattctatacttacaggaaagttacagaaatagtacagagagtttccatctacccctcacccagtttagcctcatgttaaacgtgggtatgatactgttcattgaagaccttatttgattttttcccttaatttaactttaaataaattaataaactattttttagagcagttttaggttcacggaaaaaggaggggacttttttagtacagagacttcccataccctcctccctgcaggtgcacagcctcccccgcttggccgggtggtgcgtttgttagaatccatgaacccacgtcaacacgtccttctcacccagcttccatagttcccatcagggtgcactcttggtgtgtacattctgtgggttttgacagctgtagaatgacgtgtttccaccagtaccgtatcatgtggagtcgttccacagccctgaattcctctgtgctctgcccgttcatccctcccctcctgtcagtccctggtccacggatcttattgtctcctagtttcgccttttccagaatatcatgtggttgaaattatgcagccttctcaaactggcttctctcatttaggaatatccacctgaggttcctccgtgttttttcatggcttgatggctcatttcttttcagcactgagcactattccagtgtgtggctgtgccacagtttattttatccactcacctactgaagcacatcgtggctgcttgcaagttttggcaattatgaagaaagctggtataaacatctgtgcgcaggatttcgtgtggacataaattttcagcccctttgggtaaataccaaggagcacgattgctggaccgtgtggtaagagcacgtttagttttgtaagaaaccgccagactgtcttccagcagccgcgccatgttgccttcccagcagccacggctgagggtcctgtttcttcacatcctcgccagcgttcggtgctgtccgtgttctgggttttggccgctctagtaggtgtgtgcatcttgttttaatttgcatctccctggtgacggaggatgcggagcagcttattgttgatattgttgagtttcaggagttcttggtatattttggataatagtccattatcagatgtgtcttttgcaaatattttctccttattcgattcttaccagtgtcctcgacgtcctttcctgccccgggaccctcgcggctcctcggctccttggtctcctctgcttggtggtagctgctcagtctttcctggtctttgatggccttgacgtgctggagagctctggtccttgtctggtggacgtttccttagtttgcgtttgtctggtgtctcctcgtgatgacgtccaggctgtagaatctcagttagaatgccgcgggccggctggcgtgtcctcagagcactggattgggaggcaggtggtgtcgcctggctgttgctgctgctgctgctgactttgaagcttggttaaggtggggttggctggttactccattgtcgagttactctttttctctgtgtaattagtaggtatctcaaggagacacttggaggctgctgataccatttcttatcaggcctttggcccctgcgtgggcattcgcaaggacgctgccagtggaggctgctgtggcgtctgatgctgactttctatttctgtctttctgtttacatttattaattggaattctgtaaagagagctgccccgtctcccttatttttcccacttgttaattcattcagttacttacttatattagcatggatatttatttttttctgtaggtaacaagctgctgctacagtttatttattttgttgcttgagcagcccggctctggccatcatgagctccttcaggttagttccatgtccttgtgacacgacaagaggatttggtgactttatgacaccacagaatgttccagcacatcttctgttttccatgatttcttggaggggcattgcttcctttgactggggatggtgtttcctttgatgggggatggtgtttcctttggttgggaatggtgtttcctttgattggggatggtgtttcctttgattggggatggtgtttcctttgattggggatggtgtttcctttggttggggatggtgtttcctttgattggggatggtgtttcctttgattggggatggtgtttcctttgattggggatggtgtttcctttgatgggggatggtgtttcctttgatgggggatggtgtttcctttgatgggggatggtgtttcctttggttggggatggtgtttcctttggttggggatggtgtttcctttgattggggatggtgtttcctttgatgggggatggtgtttcctttgatgggggatggtgtttcctttgatgggggatggtgtttcctttgattggggatggtgtttcctttggttggggatggtgtttcctttgatgggggatggtgtttcctttgattggggatggtgtttcctttgatgggggatggtgtttcctttgatgggggatggtgtttcctttggttggggatggtatttcctttgattggggatggtgcttcctttggtcggggatggtggttcctttggtcggggatggtgcttcctttggtcggggatggtggttcctttggtcggggatggtgtttagaaccatactctgggcagcaggtgtgctcattgctcctggggtgtccctgcatccaggccttccaggtggactggggcatgtgcacacacacaaacactcgtctgcacctgcacctgtgctgaacacagcggccttctcacttctcctcaggcctcaggatctagtctgacgtcacaggctcattctagcttccctcgtgccttacatgggaacctggttctcatcccccacagtagatgtacttctgtgttcagttccaacatacagataaaggaccttcgggattgccaggcagtgtgagaaacaaacgtgctaactacctggagtgtagcatttctgtgcggcccttttatttaacctcacaggtcaaaatagtacatttcaaatttacatagatgagtattgttcttgtttatcctttcatttttactttttatgtttaaatttttattatttgtttttagagatggagtcttgctctgtgtcctgggctggcctgaggctcctagactccagcaatcctcctgcctcagcccccaccaggagttgggactgcaggcacacacaaccaggcctggcttcctgcccacccttcagtgtggccgtcattcacctgcagcacagctcgggtttagtccctcagtgtggccgtcactcacctgcaggacagctcgggtttagtggttactgtttgtgttcctgttggtttcctccaaatcttggttgattttttgtttgtgagaggtggagcgttgccatggtccggagagtcagaactgtacaaaaacgtatagaaagaagtgccccttggagtggtgtcctgccacaccctccacccatcctcccaccccctgccccgtcctcctgctgcgccctccctccccccaccacatccgtcctcccccttccgccccctcccacccccgccacccctgccctcctcccaccttgctcgccctcctcctgctgcaccctccctagtcctgctgcaccttccctcctcctgccctgtccccgtccctccatttttgcatcccgtttctactcaccatgcaaacagatgagctcctgcatctttttccttccctggcagtgcagcacaggtcagtgacagtctctcgctctctgcagctgacagagttcccgggcactgccctcgtgtcactgcatcaggagcttcctctttcccagctgggtgctgatgtcccgggcactgccctcgtgtcactgcatcaggagcttcctctttcccagctgggtggcacttcatcgtgctgatgtcccgggcactgccctcgtgtcactgcatcaggagcttcctctttcccagctgggtggcacttcatcctgctgatgtcccgtagcttttcaccctctctcgtgtgcacatctgggctgtcgacacggtgacaggtgatgccatcaagagtcgccttgtacgtgtgtcttcgtgctgttggaggcctgctgttggggctgagttccgagagatgggattgctgaattgaggggttggtgcgtgtgcacttgtgttaggttttgccaagtccccctgttgcgtgtgagagaggcagctctttccccagcctcacacgtgtcccacgtgtgttgtcatagttcttgtgtttgctggtctgggtggtgcagtcagcgtctgtgggtgtgctgtgggtgcgtagggctgaggcacgtgatgagcgggtggacatccccgagccgctcctcagtgatgaggtcgctcagtcttccggctgctggcttagttttgtccacttgacctgttctgcggcaggcatgctgttccatgactgctgctagcatgtttctgtctcgtcgcatctcctgcgtttttattggtaggggctgctgtgttgtttggtgcataaatatccacgtgtcatatcttcattggcagctgtgactttttgcattagaaagtatctgtctttgtcacacgtcagaccgtcaccctgggtgtctttcttgtcccccagcctacaatccctgagatccttacttttcaccttctgaatcactttgttttccgtgtctctctgtagcatatggtttggtctcagtttatgagctgaattgaaaatctttctcttttaataggtgagttaagcccatttacctttattgataggactgacatgttttgtcttgactctatcataatattttataattatgtaaatttttatctatcttttgagacatggtttcactgtcacccaggctggagtttggtggcgtgatcatagctcactgcaactttgactttctgggcttaagaaggatcctcctgcctcagccgccccagtagcctgggactacaggcacacagcaccgcatctgactaatttttaaaatattttgtaggaatggggtctcgttatgttgcccaggctggtcttaaactcccagcctcagggaatcctcctgccttggcctcccttttcaaagcattgagattacaggtgtgagttgccgtacctggcctgaattttaaatatttgctgtgtttctttttctgtgagatgtttattctttgctcttttaattgattttttttttttttttgtatttaggaaggtttgtatctgtgtcttcctggttacttttgtacttaaactagtgacgacgccctggtctcctgtctcacaggactgttcacgctgcagtcgagcagtttgcacgggcctggcagctccactgttggccatcggcgtctgtgagccctagtggcttcttcctctgccttttggtgacaggacctccacaggggaggcacactctggtcctcagcctccctctcccgcctccgcctcactcagagcctgaggatgtctcttccctgcagtttcccgcccaatagaggaggctcttcctcccattcctgaggctgtttctgggccctgaccggaggcggcttggctggctcagaagtcttttctgttcttgccttgtgggggacgggtggggaggggggtgcaggctgggaggagccatggaggctgattccttccccttcatgggttctcttctcttcctccccggcagccctgccgtcggctctgagagcccgtagtgtatgaggttgcatctcagagtcccgccgcccactgggccctcgcagtgcattgggtttggtgtctcctctcgggtggggtgtgggtttggtgtctcctctcaggtggggtgtgggtttggtgtctcctctcgggtgggtgtgggtttggtgtctcctctcgggtgggtgtgggtttggtgtctcctctcgggtggggtgtgggtttggtgtctcctctcgggtggggtgtgggtttgttgtctcctctcgggtggatgtgggtttggtgtttcttctcaggtgggtgtgggttttggtgtctcctcttgggtggggtgtgggtttggtgtttcctcttgggtgggtgtgggttttggtgtctcctcttgggtgggtgtaggttgtgtgggttttggtgtctcttccgggtgggtatgggtttggtgtctcctctagggtgggtgtgggtttggtgtttcctcggatggggtgtgggttttggtgtctcctctctggtggggtgtgggtttggtgtttcctctcaggtaggtgtgggtttggtgtttcctctcagtgggtgtgggtttggtgtctcctctcgggtggggtgtgggtttggtgtctcctctcgggtggggtgtgagtttggtgtctcttctagggtgggtatgggtttgatgtctcctctccggtgggtgtgtgttgtgtgggtttggtgtctcctctcgggtggggtgtgggtttggtgtctcctcttgggtggggtgtgggtttgatgtctcctctcgggtggggtgtgagtttggtgtctcctctcgggtgggtgtgggtttgatgtctcctctccggtgggtgtgggttgtgtgggtttggtgtctcctatcgggtggggtgtgggtttaatgtctcctctcgggtggggtgtgagtttggtgtctcctctcgggtgggtgtgggtttgatgtctcctctccggtgggtgtgggttgtgtgggtttggtgtctcctctcgggtgggtgtgggtttggtgtctcctctcgggtggggtgtggtttgctgtcttttgtgaacgtctcctgggtcatggtgtgaatgtcccactctgcctgagggggagattcgcccagctctcatttgccctgttttctcctgacccttttcctcctttctgtgtctcgattctgtcctcttggcttcctgcctttcgtaggttccttactgcattttcaccgcctcccctccctcagactgtttgcagtttattcatttctgagataattttgtctcttccttccattactttcttaagtccagtcaactcttatttccttttggtgttgcatttgtaattttatggtttttataaaaatttgtctcctagtttttgaggttctgatttgaggtgatgattttcatatccttaagtgcacacttaagcagattttcctgtattgagagtgttgttaattttcttgttgttccagggtaggtttttctctgatgtgtgtggagcccccattttttgactcttctctgactttcccgtggctctgggtggctttaccgcctctgtccctttgccctggtggccttggggtatttgccacatctgtggtttcctggtgccgtctgctggccacatggggaagtccaggtcttgagcgggtccttgctggtgtgcaggacggaagttgtcctccagttctcccggccctttcctgcaggacccagaacttccccctttccttcttttctgcctcaccacccagtggccaaagggctcctctcaggacatgctgtgttgccttgacaaccccttcccgtcttgtgctcagtggtccctgccctgtggtctgcactgaccttcctggacacctctcaggccctgggacttggggtggcttagcctttcagcagtggcttcccacagacccctgtcccaccccgccccaccgcggccttgcaggggagagactggggggtcaggctcaggcgtgtgttgactctgcgccgacttgcagtgattttgaagtctaggcgccctcgtccagtgcagacggcgatgctggtgtaaacctgcgttccttgcttgtgctgaactgtgtttggaagagaggctgggagacatcagctcggcagccacgttgtcttcggcctcccggaagtgatgctaactttctaagctgtgtgtctgagtgtttttcgctactactgctgttcttcaaaacgtgctgccagtgacctggccttgtgtgtgtgacaccccgtaaatggttaggcacggagagggcacgtacgcgttcggggcggaggtggctggagtgtgtgcggcataggctattgttacccgccgcccggggcggctgtgggcacagcattctccacccattgctcggctggggctccgtggcggagtaaaggacggaccaaggggctcccgccccgggagcagacgcgctcctcccggacagcccccaggtgctgaccgtgtggggcctgacgtttgggtggcgcagaccctgcaccgggcggttccgcggacggcgactctgcatttggcttcgatactgagtgtctatggcacatatgcggtggagagacctcctcctttcatttgatccttttgagagccctgtgatggggcgagggctgtctgcagcgccatgcgtcagaggtggggacctgcaaagggagggctcacgtggtatgtccagggccgcggggattttgcttcgcttgcttgttttctaatcccagcacctgtacctaacaaaccccaagcccctgtgtttggagttgtttaggccgaggcccccagggctccatgttggtgccggcccttgtggagctgtctgtcgtcccaggctctgttttgcgccattgcgcctgcacatgccgcagtccctctggagtggccgtcgcgcctgcacgggccgcagtccctctggagtggccacggcgcctgcacgggccgcagtccctctggagtggccacggcgcctgcacatgccgcagtccctctggagtggccacggcgcctgcacatgccgcagtacctctggagtggccaccgcgcctgcacgggccacagtccctctggagtggccatcgcgcctgcacgggccgcagtccctctggagtggccatggcgcctgcacgggccgcagtccctctggagtggccatggcgcctgcacatgccacagtccctctagaggccgtcgcgcctgcatgggccgcagtccctctggagtggccatggcgcctgcacgggccgcagtccctctggagtggccatggcgcctgcacgggccgcagtccctctggagtggccatggcgcctgcacgggccgcagtccctctggagtggccattgcgcctgcacgggccgcagtccctctagagtggccatgggtgccttgaccctggtccccacaggcccttctttctcaggagtcccatggagctggaagcccccactaagcactcttctccaagcaggctccatgaccagtccctgcctgacccctctggctgctacgcccaccatgggcacagcccgtgaggggtttggatgaatctagggaggaaagccactgccactgccgtgtgggttgggcacagaaggccttggtccgctggcagccccagtcctgagaagagagggggaggttcctacgagatctccactccatcttcagagcagtttagcaacaaactctctgcgggagccaaaatccacatagaattctgcaagcaaagaccctatgggaaagacagggagtctggacccctcctgcctggggcgaagtgggctggggagaagcgggagtgtgccatgtagagaaaggcaattggagtatcaggtaggttagatttgcgtttttcttttaagatttaagaaaaatttgaagaaaaatttgtattgataaaactcacagaatctggagaagttatattgttcattcatagtgcaccttcagagcttggtgcagaagcagggcctggcatcagtttctcagcgtgctgggccctgggggtggcctcagccccaaggaggcaccgtctggccttggttggtctcgccccctcccttggttggtctcgcccccggccttggttggtctcgcccccggccttggttggtctcgccctcggccttggttcgtcttgcccccggccttggttggtctcgccccctcctttggttggtctcgcccccggccttggttggtctcaccccctcctttggttggtctcgcccccggccttggttggtctcgcgccctcccttggttggtgtcgcgccctcccttggttggtgtcgcgccctcccttggttggtgtcgcgccctcccttggttggtctcgccccctcccttggttggtgtcgcgccctcccttggttggtgtcgcgccctcccttggttggtgtcgcgccctcccttggttggtgtcgcgccctcccttggttggtgtcgcgccctcccttggttggtgtcgcgccctcccttggttggtgtcgcgccctcccttggtgtcgcgccctcccttggttggtctcgcgccctcccttggttggtctcgcgccctcccttggttggtctcgcgccctcccttggttggtctcgcgccctcccttggttggtctcgcgccctcccttggttggtctcgcgccctcccttggttggtctcgcgccctcccttggttggtctcgcgccctcccttggttggtgtcgcgccctcccttggttggtctcgtgccctcccttggttggtgctgacacttgcgttagaatatcttgatttcttaccctcggcagcctttaaattgagcacctgagatgagcgtctctccttcaccccggtcctcttttttagctgctgaactattttgaagatagaaacatcaaacacagtccggaatttatagcaggtgtcactgggtcacacagcctgtttgggtggtgcctgtgagagccctgccctcaccctgcaaactgtcactcacctcgcctgagttctcttttgggaggcctggccctcaggtgcggatcactttataatgagctagtgtggagtgcggaggcttcagtagcaaagggaccccgggcaggtctgaagaagggccctcacagcgcagggcgtctgaacggagacaggtgccctcatctgtttgaatctcacaggaataaagaaaatgcagtgggtcagagacacacttgcatgccatcacacaaggcagccatgctcccagcctgaactgaaagtggcagaacggggaaggggggaggaaggacggcatgaggggcggggccatgtcagggctgttcacagcaaggctcccactggcacacacagcagaatccgctccttccagcatcttaactttggttgagaatgtgctgtaaagatgccatcgtaatctttgtacttaaatatatgtgagcagctttcaccatcggagcagaacttagttttcatgccagctgggggaaatgacagctgttgggagttgtgtggcacgtgccccgctgggcggtgtcgtgtgtgtgtggtgcgcgccccgctgggcggtgttgtgtgtgtgtggcgcgcgccccgctgggcggtgtcgtgtgtgtggctcgtgccccgctgggcggtgtcgtgtgtgtggcgcgtgccccgctgggcggtgtcgtgtgtgtggcgcgtgccccgctgggcggtgtcgtgtgtgtggcgtgtgccccgctgggcggtgtcgtgtgtgtggcgcgtgccctgctgggcggtgtcatgcaggtgtcatcagctgaaaccgccagagctctccacaggagctggcacgcagcagctatgcttctccaagcaggaacacatctgaggcagctcgggagacacctggtcacctgtaggggctgacggaggcggcgtctgtgcagccagggcccagccagaggctcagggatcactgtgggagccactgagaaacccagccttcccagctgacccagcatgcccagtcccagccaaccccaggcctcccagtgcaggaattcagcagccaagcggggatgacacacacagacctagtgtggcttttgtgccccagctgagtccacaggcagtccagctgtggtcacatggagggtggccctggggccgctcagccatttgccttgggtgggtgccaccccctagtccatcctcagccccaggaccaggtccaagcactgtggggcattgggcagcatctgagtgtgccctgtcctgaaggtgcagcatggggcctcctgcccttgcccctgccctggcagggccctggacagcaccccagctccagctgtgggcctaccggaaggagcccgtgccaggcctggcctcctctggaatcggggtacttggctcagatacacaggctcattgcaagccccactctgagccccactaacacactgtcttctcctttttcatcaccaggggtcgggccccggctcagtggtcccaggcagctcgggtgtcggaacccccagacagttcacgcgacaaagaatcacgcgggtcaacctcagggacctcatattttgtttagaaaatgaacgtgagacaagccattcactgctgctctacaaagcattccttaagtgacacaggaggacgcctggggactttttatatatttgcagattacgcctttttgtaacgagcaaatgggatattgtttaaaaaacagccacctctttacaatggaacagttttatattcctgtttctaaatcagctcttcagtgtgaaagaaaacacgtttctgtaacagagagaacacaaaggcctgtggatactcttaaaggacaattaaatcttaactcatcttgattgagtggccttcctgccaaacaagccatatataaagactgatggaatcgttagcaaataattagctgccctctgtcaactcatagcagtttctgcattatttgtgcattttggtttagttctacctaacttactatgtaggtgtatgtctacagccgatgacctcatttcgtttattttatttttgtaatagtcagttggcaaagcaaactgattttttagactatttatcttccttcccttcccctcccaccccgctctcctctctgccccctgccctcccctcccctcccttcccctccactccgctgagaatcctggaggaatacacaattcatcgttgcacccccacctcagagtgtaatcgcatttctgcttggtagaggccgagcccagcaaaggtggctccttctgaatgtgtggtcagcatctgtacaaatgcattttatttgctatagtttgtaaagctgtaaagttaaaagagatgaaaaccttttcagcataaatatattttacttgcactgtgttttttagctaaaagtgaaaacctagattaaataaaatcaaagttgagaagaatcatcaaaagactgtttctcggtgtgaatcaagtgttgaaaaatggttggtgtattttgtcagtaattgtacataacttttggcacatgacatagaaatggctatgtaaactataattattttgctaagagactgtatgcaagccttgggccgactttacagacgtccagagcaaagccccttctttgtacctatttttttattacaaatatactaattggttctttctattttcagaggttattgtatgaaattgtctattgatagtacttttatgactgtaaatactctggctttctccgtgtgaattctcacattagactttaattcgagcgcgtgtgaactgaacgctgatcagtattttttatcaacacctgagaactgttacaccttttattttgtcttttaggaaatccctgtctttccattttttcatgtaaattttgcacagttacttgttcatatgtaaatattttactttcagaaatgaagtttttaattgctattgttttatataggattgaaagaaaattaactcctttattaaaaacaaatttatctgtatttgttttgcctatttttcctccgttttccagttttagattctactgccagattgcactccggctctgctgaggtgctggtttctgagccacctgttggaatctgtagctgagccccatcagagccgggagaaagaactttctctgtgaggacaggggccgagctactctctgcgtggagtctgggggctggcggctgcgcttaacaccttctgctgtcacaggtggagatgagctgggcacagctaggaggggcggcgggaggcccagtgctgggggagatgtacacagaaacgcacgtggcgagcccggctgaggtgcccagagggccccagccttgacgcagacctcctgtggcgagagagggcgtctccagggcagtttgtggtattggttggtcctgacaggtcacagctcctgctgggccctcagaggctcagcgccaatgtgtaccgctccctgccttcgagcaccttggagagcctttgggaacggtctctgatgcaattggagttggtctcccattgtgacgttcactccacctactgtgacggacccacagcgatatgcaggtttacgtacacgttctgctggagacactgcccctgttcccacacctgttgcactgccccactggggctgccatcacaaaggaccacagatcgtcccaccgctctgggggccacggttggagatcaagatgccagcagggtgggtttctccccaggctctggggaagggtctgctctcccagcttctggcagctgctggcacctttgggttccttggcttagacacagcgcccgatctctgcctctgcctttccacagcttctcccttgtgtatgtcggtctctgggtccagcttcccctctctgtaaggacccccagtcctgttggatcaggtcccgcccaaacgacctcattctgactggattatctctgtaaagaccctaactccagatagagtcacattctgaggaccgggggtaaagagtcctccgtatcttttttagggaggaaacaattcaccctggatacgtggccacactgagagtctcggcaggaagcactggggggcgccctctccagcttcccgctctaggccgtgccagggtcgttcactgatgggatcacatctgtgctttccatccatgacccatacctgcctttcacaaagttcttgacctgaaataaattagtttaatcaggtacaaagggcagttgcacttgaatttctgcaagtatgattgatttcattccagctcttctgctcttctgtcgggtccagtcagtctgtgtgggacggtcatggtgacttgaggcttaggccaacatgagagagattcccctcagccgggcactgccagaagaccgggtctgcaggcatgtttgttgtactctgttcttgagacccgtagctgctgtttcgcatctcatcacagatttgctggctgccctcagtctgatctgggtgtttgcccaggcctggggcacgagcagcctcgtgaacatgactgggacggccactcttgctgcctctgctccccacgtacaggcagctccagttgggcaaaaaaggcaagaaaaagaggcatcaagtatggagaggaagaaggtgaacaaaggattcagaggtgacacgactgtgtgtcttggaaatccagacgaacttacaaacacaacactgagcacggcgcgtgaactcccaaagagggccagaggcgaggccggtagctggaggtgtctgtagttccgtgtactcgcaaccaacaaccagaaggttaaaaacatgccgtcaacaatagcacggagaacacacgcccaggaatacaccgaatgaaagatgtatgagatcttacactggaactgagaaatcaaagccctcagcggaggccgacaccacagtgctagtagggaagactctgtgttgctgaagacagcaagtctgtcaggactgagaaacagatgcaatgccagctcaaccaaatcccagcaggattttcctagaaactgacaatctgattccataaatgtatatagaaatgcagaggacttaaatagccaagacagcctaggacagaatggagcacttgaccctcccacatttcaagacttcccctgaagtgacagcaatcaggatgtcgtgccgtcggagcaaagacaggcgtggctgaaggccctggtgcagttctgtgccctgtgggggaaacgtgatcttggagtccatcttcacactgtacgtaaccatcaacttgaggtggatcagagatctggaaagcgtcagaggtcttcatgactgggagtgggcaaggatttctaagcacatagaaggcacacatcctgaagaagaatgcataaattgggcctcagctacagccttttgctcatcaagatgcccttggaggttggtcagcgtttagttcaaggtcagagtggaacctttgctttttggcagtcatgttgtggtccgaggcacgggacgcacagattttctttagactggcttcttcgccacacttacacgggacgcagaggagattttctatagactggcttattcaccacacttacgaatgccacaatctatcatttagatttcatgaacacagtgggaaaaaagtgtctattcaatttttatgaaatacattgtttctgaaaaagtttagatactaatctctatttttttctttatagttttgctatgttactgaggaaaaatggaatgtaaatttctctttagaatgttaaaaaaaggtatataaagtaaaaaggcaagccacagacttggagaaatatttgcaatatttatacatgacacaggaataaagaattccactacttagtaataaaaagataacacaataacaaatgtgcgagacacttgaacaggtgctttagaaaagatacacaagtggcgaataagcaactgaaaaggtgcccaccgttactggtcattagagaaatgcaaatggacaccacagcgaggctccactgtgtgcccaccctcagggcttgaatctgaaagactctcatccagtggtggcatgttgtgtgacacaggaagctgaacgcacgtctgcccggtgtgtgacgcagtgatgaagctgaatgcccgtctacccagtgttgaatgcacgtctacccggtgtgtgatgcagtgatgaagctgaatgcacgtctacccagtgttgaatgcacgtctgcccggtgtgtgatgcagtgatgaagctgaatgcacgtctacccagtgttgaatgcacgtctacccggtgtgtgacgcagtgatgaagctgaatgcacgtctacccagtgttgaatgcacgtctgcccggtgtgtgacgcagtgatgaagctgaatgcacgtctacccagtgttgaatgcacgtctgcccggtgtgtgacgcagtgatgaagctgaatgcccgtctacccagtgttgaatgcacgtctgcccggtgtgtgatgcagtgatgaagctgaatgcacgtctacccagtgttgaatgcacgtctgcccggtgtgtgacgcagtgatgaagctgaatgcacgtctacccagtgttgaatgcacgtctacccggtgtgtgatgcagtgatgaagctgaatgcacgtctacccagtgttgaatgcacgtctacccggtgtgtgatgcagtgatgaagctgaatgcacgtctacccagtgttgaacgcacgtctgcccggtgtgtgatgcagtgatgaagctgaatgcccgtctacccagtgttgaatgcacgtctacccggtgtgtgatgcagtgatgaagctgaatgcacgtctaaccggtgttgaatgcacgtctgcccggtgtgtgacgcagtgatgaagctgaatgcccgtctaaccggtgttgaatgcacgtctgcccggtgtgtgacgcagtgatgaagctgaatgcccgtctacccagtgttgaacgcacgtctgcccggtgtgtgatgcagtgatgaagctgaatgcccgtctacccagtgttgaacgcacgtctgcctggtgtgtgatgcagtgatgaagctgaatgcccgtctacccagtgttgaacgcacgtctgcccggtgtgtgatgcagtgatgaagctgaatgcccgtctacccagtgttgaatgcatgtctacccggtgtgtgatgatgcagtgatgaagctgaatgggcatctcttcagtgtgtgacacagcgacgaagccgaatgcacatctatcctgtgaccagcagttccagtcctaagcatctacttgagaatgagttcctttgtccgcggaaaagtcatacaagaatgttcacaatggccgtattgatgctcaagatggaagcagcccaaatgcccttcagcaggtgaatggagagtcaaacagatgcatatttagtcagtgaaacgccccccaggaataaaaaggaacgaactactgatatgctccaccaggtagctgaatctcagaggagctacgctgactggaagaggccggacacagaagcctatgcattctgattccgcctgatggaagttcatgggtgggtagaagcagggtgtggggctccggtgaggagactgtcgggaaggggcgccagggccctctggggtgatgaaaatgttctgttttgatcatcatgggtgtcacacaggcgcgtgccaatgtgaaacactaagctgacaggtaatatctgtgcatttgagccagtgtaagggcacctcagttaagcaaccgggaaaggcttgggccccacccaggtgggtcacctggccccgcactagggatctgacaccaaaggactcgtggcatgtaatggccccgatggtgggccgagtgccccgacggggggccgagtgttccgacggggggccgagtgccccgacgggggggcgagtgctccgacggggggccgagtgccccgatgagggggccgagtgttccgatggggggccgagtgttccgatggggggccgagtgccccgatgggggggccgagtgttccaatggggggccgagtgctccgatggggggccgagtgcctgagaagttgtcatcgtttttccagtgctgctctgactacaaatctggtggttctccacagtcagttgctggcgttttcccttctatcagacggtggcctccaaatgtaattaaaaaaaatctttttaatactaggtctacaaatcaagtgtaattttatctaaaaaagaaaaagtctgggtggatgtggtggctcatgaggcctgtaattcccagcattttgggaggccgaggcgggcggatcacctgaggtcaggagctcgagaccatcctggccaacgtggtgaaaccccatctctacaaaaatagaattatctgagcgtggtggtgtgctccagtagtcccagctcctcgggaggctgaggcaggagagtcgcttgaacccaagaggcagaggttgcagtgagccaatgtcatgccactgcactacagcctgaggacagagcaagactgtctcaaaaaaaaaaaggaaaaggtcccctgagccttcacctggccctggcctcagggcactattcacccggggctgccactgaggcagtggcatctgtgctgctctaggctttcattggtctgagcagctttggggacccatcggggcctcctgtgtcctcagtgccatacagacagcaagtgctcaaccagtgcctgatctcacgatggtggttatgcgattcgaaagaccccagtccctatgcagccttccgaagccccctccctggcggcgctggctatgcccagcagagcgttgacacaaagctgggctgggcatagtccctgtgatgctgagctcaccaggaaggtcgaacgggagcttcctagagcaccttcaagacttgcttggaagacagatcacactccttgttagaaacgcagctagctgcttgtcaggctgttcactcctaactgctagaatttgtttgagaaggatgggcatgcgtatatctgtctgctagaatttgtttgagaaggatgggcatgcgtatatctgtctgctagaatttctgtttgagaaggatgggcatgcgtatatctgtcttttctcaatgttcttactcagcaagtgctgtgagcgcctctcaggcatgggagcccttccaggggctgcaggggccggaccctggggagcctcctggctggcgaaggggctgggtagaggcttgaggtggaaaaggctggggctggggaagggcgcaggtggacaggagagctctcaggtgtgagcagaagagaggcggcttctctctgggtgcatctgaggaggatgttgagaatcatgtttcctgagcttatttagaaattaaaaacgcaacaaaataccaggaacacactcgtgaggatgggaccaggacgagtgtcgggagggcacggaactcctggaggtgctggggtgtggactgtggttcacacccttctggcagtttcttaaggggttaaacatgcgtctctcaccgctgcttctggagaaatgaacacaggtgtccagcaaagccttgtacaaggttcacagcagctttattttaccccgcagtggaacgcttgcgacagcaggagcccgctgcttccacttgtgggagatgctgggcagcgcagtgatgggagtgaggaaaggcccttgggcacctttgtcgatggggtgggagaggcctgccaagggcgtgaagaaacttgggtgatggagaattatcttgactgtgatggtttcacaggtgtgcaaagtgtcgaaactttccgcattgcacactataaatatatgcaggttaccatacgtcaatcaggtctatctcaataacgctgcaaaaataaatgaatgaaaaataaaaaagctgcgttcgtgtgtggagacaggaacatgggaggtgccaaatggaagaagcagaggtgcgggtggggaagaggtgagggtggggcactggggagggggaaggaaggtgcagggaaggggaaggagggttcagggagtggggagggggttacagggaggagggatgggtgaagggggaggggagcagggggtgcagggaggaggggaaaaggcagcaaggggagggggaaaagggaggggaggggggaagggaggacgggggaaaggaggagagggggaaagggaggggggaacggaggggaggtggggaaagggaggagggggtaaaaaaaggggaggaaggaagggaggggaagggggaagggaggggaggtgggaaggggtgcagggaggtggcaggtttgatggtgctgaggggcggggtggggggcactgctcctgaccctggtccaggtccagcactgtctgctgatgctggaggtggggtgggaggtccgaggtgggaggagggaggaggtctggtcctggtggagggacctttccatctctaggctgcaggggtggtggggagggagggacgtacaatattgtttcgccaacaagcgtccaaggagctggagcttgctgggctgccagagtcccctgaatgtggcccagttctctagcagggccttccactctgtgctgctcttcccctatgtcctctcaaatgccaccagctccaggaagccctccgcctccgtcctgagcactcatcccctcaccagcagccctctgggtcacttcagacttcacttcttggccacactggagccctggtggtccctgggccgcctcagaagcttatgagaaatgccacgtgatgactgagggggccccgtgtctcccggcacagcgccttgcacgggcacatggggccagcaggccccacccatcctacccgctcggggtggacccaggggggtgggtcatgtggcctggcttgtcttggtcactgacacaagctgagggatggccgtgacctcagcctggccagtcctgtctcacccagacatgttacaggaactcccagaaggacacttcatgtttgggggctggcaggacgtcagctcagttgtccaaggactgccaccgtggccactgcggggcagagtgtggctgagaccaacacagaggccgaatgaagagccagccttgatggcatcccggagcgcctggatccagccgtgcctgaggactggcgcctggatccagccgtgcctgaagactggcactgggtctgttttcatggttgggggcaggtggctataagaatgccacacaccaattccaggctgcggtggacccagccagccacgagaacgagctcccaggagctgaggatggagggggagcccgacattgcaagccaggccctggaaagccaactgcccagtcctcgctgctgccctgccagggcccctccccgcccttcccctcccagggtagattgaggggaaaagaagcgtgggccccaaccctggtggtgccgagaacccttgccagagagactttggggagcgctccccctagaggggatgtcagaggcttttggacactcggtgtgtggggaggtgctgagactcctggcgggtcctgagggctggattggggccacatggtggggctgaggcccaccccttctgagggccccagagggaagggtccccacaccccctcctcagagcacccacttgctgcgtttggggaggggctagtcgaggcctccctgttcctccagggagagtctggcttaggccctcctccggatgcagatggccctttcccctgtgagcctcagtctcctcatctctgaaatggggacagtggcagcaccacccagcgcccgggtggccgagggttgacctcagcgcactcgcccccacctggccgcagagacaggaacacaaaacacgcagctgccctgcggggtaggggacacgtggcaggccaggggaggggcggggccggagggtcggggtcggggctagagggctgggggcggggccgggggcagggccgaggcggcaggtggcagcgcgagttcgcggcgggtctggggcggacacaggctgtgccttgtgggagccgaggaggagccaggggcggggggcccggggaggagatcaggctcgagcccgtgggtaaggcccggggcggggcacctgggcctgggatgctgggtgcatggtgggggccaggtggggggcaacgggatgtgagtgggggcggccgggggggccagggaggctggggaggcgggacgcggcccgtgtggggacgcgggtgccgggtggagggtgccggggactggagtcccggtgcgccccgcgtccttcgtggaggacaccttcgcctcctcccaccctgcctgtgtccgtctacacctccccaagcagacacctggcccgtaccccggggtttagagcccagggcagtcgcagtcacccaggctgactcgcgggagggctgccgatgtgccaggctctgcggggaggggaggggtcacaaacctgccacagtccctgcacgtcgggtcgttgccggtggaactcctgagagggcaccagacgttggaacccaagaggcatttggcaccacaacccccaggtagaagaaaaaaggaaaaaggggcccaggaggacgcagtcctgcgaaccccgcgaaggcttatctccagggagtaaaagactcggggaccccccgccttcccggacctcagggcatctagggtcctgcagtcgcctggggtggtgacacccggaacggtgtgcaggcagggcagggcaggcggagccagcaccgaccgcatctccaggggatcttgcttctcagagaggagactcttcccagaaagcaaaacaggcggggacaccctagattcggcagcagctcccaggaggagggactgcagggacagactcggggcttcctggtaggcaggtgggtgggaaactggctcagcctccaccacagcagcttgaagcacagccaccagtgcctgagaaaggacctctgctcttcctaaagccaaggaggctccgtgagggtgaagcggggccagaccccaccccagccacacagggctttggcttgccgtcttgactcctccagcagtgacttgaagtttctcagctcagtttaaaaaaacaaaacaaaacaaaacaataaaaaaaaaattggcctattgcggtggctcacgcctgtaatcccagcactttggctggctgaggtgggaggattgcttgagcctggcagtttgagaccagtctgggcaacaaggcaagatcctgtctatataaaaaatacagaaattttcatgcatgcctgtagtcccaactactcaggaggctgaggtgggaggatcacctgagcccaggagttcaaggttgcagtgagctgtgatcatgccattgtactctagcctaggggtggaccctgtccaggacctagggtcttgagagcaagaccctgtctccaaacaaacaaacaccaccccaaacaaactcaactaggaattttactgggattgcattgaatctacaaattgatttggggagaactgacattttacattattgaattttctaatccaggaatatggcatagccatttatttatgtgtttaatttcactgtgtagtttgcaggtggaggtctttcatgtctccaattagatttatttctaagtatttggatgctgatatggtttggctgtgtccccacccaaatcccatcttgaattgtagctcccataatcagcacgtgttgtgggaggggcctggtgggaggtacctgaatcatgggggtgggtttttcccgtgctgttctcgtgatagtgaataagtctcatgagatctgatggttttataaagggcagtctccctgcacacgctctcttgcctgccgccatgtaagacgtgactttgcttctccaccttccgccatgattgtgagacctcttcagccacgtggaactgtgagtccattaaacctctttttcttcataaattacccatcttggctatttcttcacagcagtatgaaaatggactaatacagatactgttgtaaatgctataattttaaagttcgtgttctgtttgtttgtgctagtctacaaacacttgatggatttgttttttgggtatattgaccttgtccccagtgaccttataactccactgattaattctaacagattgtttatctattcttgaggcgttcctctgtatgcagctgtgtcatccgtgaacaaccacattttatttttttcccttccaacctttacatcttttattttttcttgctttctgcacaggctgaggcttccaggccaatgctaagaagagtgtggtccggggcccttgcctcctttccatctccagaggaagtcttcctgtgcctcagtaaactttctgatcttcatgcaagtcctgtgcttggctgggtgggctttcctaaggcaagtccctgtgtactgtcctgatatttgttgtaccctgggcacggaggggctcagccaaagcctcctgtagcccagccccccagttgctcccctcccttcgggattgagagagggaagcaggccccggcggtgggtgtggtttggtggcgagcggcactcctgtctcctgtgcctcccggggtctctgtgtgttttgtcagcagtctcctgagccatggggggctttcctcctagatgtgctcacgtggtcaaggtgggctcctggttttttttgtttgtttgtttttttctgagatggagcctcactcttcggcccaggcggaacggcagtggcgccatctcggctcactgcaagctccgcctcccgggttcatgccattctcctgcctcagcctcccgagtagctgggactacaggcgcctgccaccgtgcccggctaattttttgtatttttagtagagatggggtttcaccgtgttagccaggatggtcttgatctcttgacctcgtgatctgcctgccttggcctcccaaagtgctgggattacaggcgtgagccaccgcacccggccgttttttgtttttgaaacaggatctctctgtcgtccaggccggagtgcggtggtgcaatcatagctcactgcagcctggaactcctggctcaagcaatccttcggcctcagcctgtagctgggactccaggcatgcaccaccacacctggcttgtttttaaaatttttttgtagagatggagtctccctatgttgctagcattggtgtcaaactcctgggctcaagagatcctcttgccttggcctcccaaagcgctgggattaccggtgtgagccaccatgcctggcctaggcgggctcattttcgctgggagtgtctgctttctggtcattatcggtgcctgctgttcctgaatcactgctgcctggagacatcttcctgttctatctggaaaacttcctggtcctacagcctgtgaatggctgatcagggctcatgagccaagtagaactctgggacccaatccaattaaacaatggtggaggtcactgtgcacagtgtgccccacaaactctgctccacgccctgtggcagcctctcctctggcctcagcccaccctgcaccacactccccaggcccatccgccttccccttatcagggaaacatgaccgtgattttgggcttcttgcctccagaactgagggaatacacttctgttactttataccacctcgttcatgtcctgtgtcagtgcagccccgtaacatgagcccagctggagaaaggaccactcgctagggttagagggaacaatccccagagctcacacaaggctgggaatagggcgtctagccatcagtcagaggcaaacacctcctcattcgtggggcgtggcatagagcacccagaaggacttttcctcaccaccgaggaatgctctgctttcctacctaacaaagcaaggtccccaaggatgaaactgttaagtgacgtgatagtgtcccacagcaaagctcaagaatgtttggaatacagaaacatccaacacccagaaacgtaacagtcacaatgtatggcattcaattaaaaaaaaaaattaccaggccagcagagaagcaggaaaatacaacccgtaatgagcagaaaatccaacccattaaaattgacctagaaatgtgataggtgagagaattgctatgcaaagaaattcacacagtcactgtaactatgatgcatgctcaggaagccagctgaaagcccaagaagagacaaagaacgtataaaaaggctctgacaagactgggtatggtggctcatacctgtgatcccagcacttagggaggccaaggcaggaggatcgcctgagcccaggagttcaagaccagcctgggcaacacagcaagaccctgttgttaaaaaaaaaaaaaaagtctctgacgaaactgctggagataaaaaccacaatgtctgatgtgaaaatcacactggatgaggtacgacatgaatggtagagtggacttggcggaggaaaagagcagaggacctgaagatgtagcagtagaaatcatataaaatataacacatgaggggaagggagggaaaaagactccagagcatcagtgggctgtatgaggatgatgccaacgggttagtatgtctgtaagggaagcttcccaaagaggagaagcaaaaaaacatttgaagaaatagtgattaaagttattccaaatttggtgaaatctaagaagctcatacataagaaacacacaaaacataagaaacacacacaaaaacccgacatcagccaggcgcggtggctcacgcctgtaatcccagcgctttgggaggccgaggcaggaggatcgcttgagcccaggatttcgagaccagccttggcaacgtggcaaaaacccaactccacaaaaaatacaagaattttccaggcatagtgatgcacaccagcagtcccagctatctgggaggccgaggcaggaggattgtttgagcctgggtggcggaatgagaccctgtttaaaaaacaaaacaaaaactgacagcaaggcacgtaaaaaatcaaatggccttaaaaagaaaatttttaaggaacaaaaggatgacaatatttttgtcagaatatttgcattgttggaaacaacacaggctggaaatggtggaacggcatcccgaaagcactgaaagaaaacaacagtcgatgtaaaattcttttttttttttttttccaatggagtctcgctctgttggctgggctggagtgcaatggtgcaatctcggctcacggcaacctccgcctcccgggttcaaactattctcgtgcctcagcctcctgagtagcaggcacatgccaccatgctcagttaatttttgtatttttagtaaagacagggtttcaccatgttggccaggctgatcttgaactcctgacctcaggtgatccacctgcctcggcctcccagagtgctgggattataggcgagagccaccgcgcccagccaatttaaaattctttacccaatgaaaacatttttttctttagaaaaggtgaaattagtttttcagaaacacaaaaattgaaagagttcatcgccatcagacctgtgtcccggcaatgttaaagtgatgtcccattgttaccgggtggaacgtcttgactgtgggttgtccaggttcttggtgtgttgaacaaagaattgaacaaaatgcacaaacaaagcaacaaaagaacgaagcaatgaaaggcaagcaacgaaagaaaggagtaacgaaagcacagatttttatttatttatttttaaaatgtttactggaacgccatgcattgccttcatttattgtatttcaaatcactgtacatttacttttgtgaaaacactgcctacattttctactacaaaaaaaaaaccttagaaattgtttcaggaacgtggataactagtcgacttaaatattaccgctgcactacagccatttctgcaattcccgtttcttaaataactgtcttgtctgaaaacacacaatatatggagcaattgtgaaaaacagacatttacatatacttctaaagtcttactgaaaatgtctttttggcccgggataaccaatcataggtgcggctgcagtagcaggatatgagggttcctgttggttcttaccatcgtgcgtatttggaatattatttctgttttgctgagtcgaaggcacagctacattgaggcggaagtacattccgcagagtgggagcggactcgagcaagtggctcaagacactatcccccccattgcaatgctccccaggtttttataaagctaaaagatttggtaacacccctaggtgccctttagaagcctcccattggttacaccctatgaaggattgatctgcggccaatcagaggctgacgtggaggcttctgtcttgtcatcacaggggtggggatgcggcctgtgtgccgcccagtcttgcctggagctggcggagcctgctgctcttttgcttctgccttaacccttggttaccccaattccctattctcctgcctcagcatcctcaacatattaagtaaggttaaagtaagctctgtaagcagaaggaaagtcatatcaaacggacacaacagtaaagaaatagcaccagaaatggcaactatgtagccaaatatagagacgaacattcctgtgagacaagggattggaacagacttccccaaagaagaagtacagatggcaaatgagcacacacaaagatgctcagcgtcattcgtcatcaaggaaacacaaatttgaaccacagtgggacactgctgcgctcctcctggaaaggctggaatgtacaggacggaccatgccagcgcagggaagggtgtagattcgctggaacccccagaccctgcatgggggagtgtaacatgctacagacattttagaaatcagcctggcagtttcttgaaaagttacacctcagtcaccacgtgatccagcagttccaccccaggtggccatccaggagaaggcctctgtccatgtaaagaacttgacttcgacattcatagcggctttattcataatagccgtgaacgggagacaagccaaatacccttcaacaggtgaatggataaaataaattgtagtacacccacataaggaaagtttttcagctagaaaaacagaatgagctaccccagggtgcagcaacgataactctcaaaagcattatgtttggtgatagaggacagactcaaaatgctgcatcctgggtggtttcatttatatgaaagtcaaaactacaggaatagcgaatagaatacaggagcccagggcgagggtggaggaggggattgagtgtaaagaggcccagggagggaaagttttggtgtgatgggaatgttccacgtaatcatcgtgctggtggttacacaactagttttggtgtgatgggaatgttccacgtaatcatcgtgctggtggttacacaactgtgtacatttgtcagaactcatcaaattatatttaaaattggtgaattttgttgtatgtaaattatacctcagagagttttgttgttgttttctgagacggggtcttgctctgtcatccaggctggagtgcagatgtgtgatcacagctcacagcagccttggcctcctgggctcaagtgatctgcatgcctcaacttcccaagtagctgggaccacagacgcacgtcactacactaggatattttaaacaatttttttttttagtagagatggggtcttgctatgtttcccaggctggtcttgaactgctaggctcaagcgatcccccgccttggcctcccaaagtgctgaggttacaggtgtgagccactgtgcccagctctagtttttattttatttcaatagctttgcacaggtggtttttggttccatggatgaattgtgtagtggtgaagtctgagattttagtgcacccatcacctgagtagtgtacattgtacccaataggtagtttttttttttttttttgagacagagattcgctcttgttgcccaggctggagtgcaatggcatgatcttggctcaccgcaacctctgcctcccaggttcaagtgattctcccgcttcagcctactgagcagctgggattacaggcgtgcgccaccacacccggctaattttgtatttttagtagagatgggtttctccatgttggtcaggcttgtcttcaactcctgacctcaggtgatccgcctgcctcagcctcccaaagtgcttggattacaggggtgagccatcacacccggcctcccaataggtagttttttgtccctcatccccatccctccctcctcctctttgattctccagtgttcattataccactctgcatgcctttgtgtacccacagcttagctcccgcttataagtgagaacatacagtatttggttttctattcctgagttgcatcacttagaataatggtctgcagttccatccaagttgctacaaaatgcattatttcattctttttatgactgagttgtatttcatgacatatatatgtgtgtatttcattatctgtctgtccgaccatccgtccgtccatccttccatccatccatctatctatctatctatctatctatctaaatctatctcacactttctttatctgctcatcagctgataggcacttgggttggttccatgtctttgcagttgtgaattgtgctgtgataaacacacatgtgcaggtgtctttttgaggtaatgacttcctttcctttgggtggatgcccagtagagggattgctgggtcgaatggctaatctacttttagttctttgagaaatctccatactgttttctatagaggttgtattagtttacattcctgccagcagtgtgtaagcattccctttcaccacctccacaccaacatctattgttttttgactttttagtgaggcagaaatttaaaaataaatatgcattcattcactctaagaaaagtaacaggcaaggcaaaggttaaaaagaaaagaacaagttttcctctgcctagcaggggaaagtgcagcaggctcacttcaaggacagttataagataacactgtttgagtagccaccgccaaaggaatgggctccagacacccccactccagagcaaggttgagggaaaaaagaaagacaaattcttttactgttactcctttcccaggcttcttaagcatgattatgttttacaaatgtctgtatttagctagttcttgtttttcttttgacacagctgtgaggtcactagctatgcaaggccacaagttatgctaagtcaacagttacgctatagattacgtgacctgtcactgtacgattaactgctttgttttactcttgtaagtccgcttataaaaaccctgctcagtctttgttcaatgctcagctttttggatgtgagtcctctgagccggtacgtacctaaaataaacaacaatcctcctgtactccatagtggtctctccgttcctcagtttaccgcaacattaataatggccattctggctggaataaggtggtatctcattgtggttttaatttgcatttccctaatgattagtgatgtcaagcatttttcatgtgtttcttggccatttgtttatcttcttttgagaaatgtctattcgtgtcatttgcccactttttaatgagattgtttttcttttcttgctgatttgagttccttgcagattctgattattagttctttatcaaatgcatagtttgcaaacattttctcccattctgcgggtgttctgtttactctaatgattctttcttttgcagtgcagaaggtttttagtttaattaggtcccacttatttatatttggttttgttgcatttgcttttggggtcttggtcataaattctttgccaaggctgatgtccagaagagttttgcctaggttttcttctagaatttttatggtttcagatcttagattaaagtctttaattcatttgagttgatttttgtatatgctgaaagataggtatccagtttcattcttctacacgtggctcaccagtttttcctagcatctattgaatacggttttgtttgctttatcaaagatcagttggtcgtaaggatttggctttatttcttcattctctattctgttctattggtctgttatctacttttgcaccagtatcatgctgtttggtaactatagccctgtagtatagttggaagtcaggtaatgtgatgcctccagatttgttctttttgcttaagattgctttgcctattgaggctcttttttggttccaaatgaattttagcattgtttttctaattctgtgaaaaaggaatgttggtattttgataggaattgcactgaatctgtagattgctttgggcagtttggtcattttcacaatattgattcttccaataagtgagcatgggatatatttccatttgtgtcatctgtgatttccttcagcagtgtttgtagttctccttgtagagatctttcacccccttgggtacatatattcctaggtattttatttttttgcagctattgtaaaagggattgagttcttgatttgattctcagcttggtcatcgttggtgtatagcagtgctacattgatgttgtgaccgaggctttactgaattcatttatcgaatctaggagtcttttggaggagtctttagggctttctaggtataagatcataccattggcaaacaggtagtttgaattcctcttttccaatttgaatgtcctttatttctttctcttgcctgatggctctggctaagaaattcagctagtttgcaaaagcaaagaaaagagggtatcagcctgggaaaaggcatacaggaagatagctcaaagtgagcacattagattcagggcgaacaggtgtgtgtggagtagggtttgagggctactgagtggaactctcagatcgcagagggaggacccattctcccccaccatcggggtggctgggctggtcattgtggggagctggctcgtggccagcgtggatgtcctcccctctgtgagttggctctctgccccgcgccaccaggaggatgtcctttgt
